United States Patent Application Publication US 2026/0224678 A1, published August 6, 2026 (application 19/154,065).

The application's sequence listing, which the Patent Office published only in electronic form, follows.

SEQUENCE LISTING (2629 sequences)

SEQ ID NO: 1 - protein, 9 aa, Synthetic construct
GWLHKRGKY

SEQ ID NO: 2 - protein, 9 aa, Synthetic construct
WLHKRGKYI

SEQ ID NO: 3 - protein, 9 aa, Synthetic construct
LHKRGKYIK

SEQ ID NO: 4 - protein, 9 aa, Synthetic construct
HKRGKYIKT

SEQ ID NO: 5 - protein, 9 aa, Synthetic construct
KRGKYIKTW

SEQ ID NO: 6 - protein, 9 aa, Synthetic construct
GKYSSGFCN

SEQ ID NO: 7 - protein, 9 aa, Synthetic construct
KYSSGFCNI

SEQ ID NO: 8 - protein, 9 aa, Synthetic construct
YSSGFCNIA

SEQ ID NO: 9 - protein, 9 aa, Synthetic construct
SSGFCNIAV

SEQ ID NO: 10 - protein, 9 aa, Synthetic construct
SGFCNIAVK

SEQ ID NO: 11 - protein, 9 aa, Synthetic construct
EARRLIVSK

SEQ ID NO: 12 - protein, 9 aa, Synthetic construct
ARRLIVSKN

SEQ ID NO: 13 - protein, 9 aa, Synthetic construct
RRLIVSKNA

SEQ ID NO: 14 - protein, 9 aa, Synthetic construct
RLIVSKNAG

SEQ ID NO: 15 - protein, 9 aa, Synthetic construct
LIVSKNAGE

SEQ ID NO: 16 - protein, 9 aa, Synthetic construct
GDFGLATEK

SEQ ID NO: 17 - protein, 9 aa, Synthetic construct
DFGLATEKS

SEQ ID NO: 18 - protein, 9 aa, Synthetic construct
FGLATEKSR

SEQ ID NO: 19 - protein, 9 aa, Synthetic construct
GLATEKSRW

SEQ ID NO: 20 - protein, 9 aa, Synthetic construct
LATEKSRWS

SEQ ID NO: 21 - protein, 9 aa, Synthetic construct
GDFGLATMK

SEQ ID NO: 22 - protein, 9 aa, Synthetic construct
DFGLATMKS

SEQ ID NO: 23 - protein, 9 aa, Synthetic construct
FGLATMKSR

SEQ ID NO: 24 - protein, 9 aa, Synthetic construct
GLATMKSRW

SEQ ID NO: 25 - protein, 9 aa, Synthetic construct
LATMKSRWS

SEQ ID NO: 26 - protein, 9 aa, Synthetic construct
ATLTRPVYD

SEQ ID NO: 27 - protein, 9 aa, Synthetic construct
TLTRPVYDA

SEQ ID NO: 28 - protein, 9 aa, Synthetic construct
LTRPVYDAA

SEQ ID NO: 29 - protein, 9 aa, Synthetic construct
TRPVYDAAR

SEQ ID NO: 30 - protein, 9 aa, Synthetic construct
RPVYDAARE

SEQ ID NO: 31 - protein, 9 aa, Synthetic construct
QQQSYLDCG

SEQ ID NO: 32 - protein, 9 aa, Synthetic construct
QQSYLDCGI

SEQ ID NO: 33 - protein, 9 aa, Synthetic construct
QSYLDCGIH

SEQ ID NO: 34 - protein, 9 aa, Synthetic construct
SYLDCGIHS

SEQ ID NO: 35 - protein, 9 aa, Synthetic construct
YLDCGIHSG

SEQ ID NO: 36 - protein, 9 aa, Synthetic construct
YLDSGIHCG

SEQ ID NO: 37 - protein, 9 aa, Synthetic construct
LDSGIHCGA

SEQ ID NO: 38 - protein, 9 aa, Synthetic construct
DSGIHCGAT

SEQ ID NO: 39 - protein, 9 aa, Synthetic construct
SGIHCGATT

SEQ ID NO: 40 - protein, 9 aa, Synthetic construct
GIHCGATTT

SEQ ID NO: 41 - protein, 9 aa, Synthetic construct
YLDSGIHFG

SEQ ID NO: 42 - protein, 9 aa, Synthetic construct
LDSGIHFGA

SEQ ID NO: 43 - protein, 9 aa, Synthetic construct
DSGIHFGAT

SEQ ID NO: 44 - protein, 9 aa, Synthetic construct
SGIHFGATT

SEQ ID NO: 45 - protein, 9 aa, Synthetic construct
GIHFGATTT

SEQ ID NO: 46 - protein, 9 aa, Synthetic construct
GATTTAPPL

SEQ ID NO: 47 - protein, 9 aa, Synthetic construct
ATTTAPPLS

SEQ ID NO: 48 - protein, 9 aa, Synthetic construct
TTTAPPLSG

SEQ ID NO: 49 - protein, 9 aa, Synthetic construct
TTAPPLSGK

SEQ ID NO: 50 - protein, 9 aa, Synthetic construct
TAPPLSGKG

SEQ ID NO: 51 - protein, 9 aa, Synthetic construct
GIHSGATAT

SEQ ID NO: 52 - protein, 9 aa, Synthetic construct
IHSGATATA

SEQ ID NO: 53 - protein, 9 aa, Synthetic construct
HSGATATAP

SEQ ID NO: 54 - protein, 9 aa, Synthetic construct
SGATATAPS

SEQ ID NO: 55 - protein, 9 aa, Synthetic construct
GATATAPSL

SEQ ID NO: 56 - protein, 9 aa, Synthetic construct
EGKYSFGVT

SEQ ID NO: 57 - protein, 9 aa, Synthetic construct
GKYSFGVTC

SEQ ID NO: 58 - protein, 9 aa, Synthetic construct
KYSFGVTCV

SEQ ID NO: 59 - protein, 9 aa, Synthetic construct
YSFGVTCVK

SEQ ID NO: 60 - protein, 9 aa, Synthetic construct
SFGVTCVKK

SEQ ID NO: 61 - protein, 9 aa, Synthetic construct
CVKTCPAVV

SEQ ID NO: 62 - protein, 9 aa, Synthetic construct
VKTCPAVVM

SEQ ID NO: 63 - protein, 9 aa, Synthetic construct
KTCPAVVMG

SEQ ID NO: 64 - protein, 9 aa, Synthetic construct
TCPAVVMGE

SEQ ID NO: 65 - protein, 9 aa, Synthetic construct
CPAVVMGEN

SEQ ID NO: 66 - protein, 9 aa, Synthetic construct
VKITDFGRA

SEQ ID NO: 67 - protein, 9 aa, Synthetic construct
KITDFGRAK

SEQ ID NO: 68 - protein, 9 aa, Synthetic construct
ITDFGRAKL

SEQ ID NO: 69 - protein, 9 aa, Synthetic construct
TDFGRAKLL

SEQ ID NO: 70 - protein, 9 aa, Synthetic construct
DFGRAKLLG

SEQ ID NO: 71 - protein, 9 aa, Synthetic construct
YGHTSTVCC

SEQ ID NO: 72 - protein, 9 aa, Synthetic construct
GHTSTVCCM

SEQ ID NO: 73 - protein, 9 aa, Synthetic construct
HTSTVCCMH

SEQ ID NO: 74 - protein, 9 aa, Synthetic construct
TSTVCCMHL

SEQ ID NO: 75 - protein, 9 aa, Synthetic construct
STVCCMHLH

SEQ ID NO: 76 - protein, 9 aa, Synthetic construct
YGHTSTVGC

SEQ ID NO: 77 - protein, 9 aa, Synthetic construct
GHTSTVGCM

SEQ ID NO: 78 - protein, 9 aa, Synthetic construct
HTSTVGCMH

SEQ ID NO: 79 - protein, 9 aa, Synthetic construct
TSTVGCMHL

SEQ ID NO: 80 - protein, 9 aa, Synthetic construct
STVGCMHLH

SEQ ID NO: 81 - protein, 9 aa, Synthetic construct
KRVVSGSQD

SEQ ID NO: 82 - protein, 9 aa, Synthetic construct
RVVSGSQDA

SEQ ID NO: 83 - protein, 9 aa, Synthetic construct
VVSGSQDAT

SEQ ID NO: 84 - protein, 9 aa, Synthetic construct
VSGSQDATL

SEQ ID NO: 85 - protein, 9 aa, Synthetic construct
SGSQDATLR

SEQ ID NO: 86 - protein, 9 aa, Synthetic construct
MGHVAAVCC

SEQ ID NO: 87 - protein, 9 aa, Synthetic construct
GHVAAVCCV

SEQ ID NO: 88 - protein, 9 aa, Synthetic construct
HVAAVCCVQ

SEQ ID NO: 89 - protein, 9 aa, Synthetic construct
VAAVCCVQY

SEQ ID NO: 90 - protein, 9 aa, Synthetic construct
AAVCCVQYD

SEQ ID NO: 91 - protein, 9 aa, Synthetic construct
MGHVAAVGC

SEQ ID NO: 92 - protein, 9 aa, Synthetic construct
GHVAAVGCV

SEQ ID NO: 93 - protein, 9 aa, Synthetic construct
HVAAVGCVQ

SEQ ID NO: 94 - protein, 9 aa, Synthetic construct
VAAVGCVQY

SEQ ID NO: 95 - protein, 9 aa, Synthetic construct
AAVGCVQYD

SEQ ID NO: 96 - protein, 9 aa, Synthetic construct
HLDVVERWP

SEQ ID NO: 97 - protein, 9 aa, Synthetic construct
LDVVERWPH

SEQ ID NO: 98 - protein, 9 aa, Synthetic construct
DVVERWPHR

SEQ ID NO: 99 - protein, 9 aa, Synthetic construct
VVERWPHRP

SEQ ID NO: 100 - protein, 9 aa, Synthetic construct
VERWPHRPI

SEQ ID NO: 101 - protein, 9 aa, Synthetic construct
TLDVLERCP

SEQ ID NO: 102 - protein, 9 aa, Synthetic construct
LDVLERCPH

SEQ ID NO: 103 - protein, 9 aa, Synthetic construct
DVLERCPHR

SEQ ID NO: 104 - protein, 9 aa, Synthetic construct
VLERCPHRP

SEQ ID NO: 105 - protein, 9 aa, Synthetic construct
LERCPHRPI

SEQ ID NO: 106 - protein, 9 aa, Synthetic construct
RMVDVGGLR

SEQ ID NO: 107 - protein, 9 aa, Synthetic construct
MVDVGGLRS

SEQ ID NO: 108 - protein, 9 aa, Synthetic construct
VDVGGLRSE

SEQ ID NO: 109 - protein, 9 aa, Synthetic construct
DVGGLRSER

SEQ ID NO: 110 - protein, 9 aa, Synthetic construct
VGGLRSERR

SEQ ID NO: 111 - protein, 9 aa, Synthetic construct
RMVDVGGLR

SEQ ID NO: 112 - protein, 9 aa, Synthetic construct
MVDVGGLRS

SEQ ID NO: 113 - protein, 9 aa, Synthetic construct
VDVGGLRSE

SEQ ID NO: 114 - protein, 9 aa, Synthetic construct
DVGGLRSER

SEQ ID NO: 115 - protein, 9 aa, Synthetic construct
VGGLRSERR

SEQ ID NO: 116 - protein, 9 aa, Synthetic construct
RMVDVGGPR

SEQ ID NO: 117 - protein, 9 aa, Synthetic construct
MVDVGGPRS

SEQ ID NO: 118 - protein, 9 aa, Synthetic construct
VDVGGPRSE

SEQ ID NO: 119 - protein, 9 aa, Synthetic construct
DVGGPRSER

SEQ ID NO: 120 - protein, 9 aa, Synthetic construct
VGGPRSERR

SEQ ID NO: 121 - protein, 9 aa, Synthetic construct
DQDLLRCCV

SEQ ID NO: 122 - protein, 9 aa, Synthetic construct
QDLLRCCVL

SEQ ID NO: 123 - protein, 9 aa, Synthetic construct
DLLRCCVLT

SEQ ID NO: 124 - protein, 9 aa, Synthetic construct
LLRCCVLTS

SEQ ID NO: 125 - protein, 9 aa, Synthetic construct
LRCCVLTSG

SEQ ID NO: 126 - protein, 9 aa, Synthetic construct
DILDTAGRE

SEQ ID NO: 127 - protein, 9 aa, Synthetic construct
ILDTAGREE

SEQ ID NO: 128 - protein, 9 aa, Synthetic construct
LDTAGREEY

SEQ ID NO: 129 - protein, 9 aa, Synthetic construct
DTAGREEYS

SEQ ID NO: 130 - protein, 9 aa, Synthetic construct
TAGREEYSA

SEQ ID NO: 131 - protein, 9 aa, Synthetic construct
IPFIETSTK

SEQ ID NO: 132 - protein, 9 aa, Synthetic construct
PFIETSTKT

SEQ ID NO: 133 - protein, 9 aa, Synthetic construct
FIETSTKTR

SEQ ID NO: 134 - protein, 9 aa, Synthetic construct
IETSTKTRQ

SEQ ID NO: 135 - protein, 9 aa, Synthetic construct
ETSTKTRQR

SEQ ID NO: 136 - protein, 9 aa, Synthetic construct
KLVVVGAAG

SEQ ID NO: 137 - protein, 9 aa, Synthetic construct
LVVVGAAGV

SEQ ID NO: 138 - protein, 9 aa, Synthetic construct
VVVGAAGVG

SEQ ID NO: 139 - protein, 9 aa, Synthetic construct
VVGAAGVGK

SEQ ID NO: 140 - protein, 9 aa, Synthetic construct
VGAAGVGKS

SEQ ID NO: 141 - protein, 9 aa, Synthetic construct
KLVVVGACG

SEQ ID NO: 142 - protein, 9 aa, Synthetic construct
LVVVGACGV

SEQ ID NO: 143 - protein, 9 aa, Synthetic construct
VVVGACGVG

SEQ ID NO: 144 - protein, 9 aa, Synthetic construct
VVGACGVGK

SEQ ID NO: 145 - protein, 9 aa, Synthetic construct
VGACGVGKS

SEQ ID NO: 146 - protein, 9 aa, Synthetic construct
KLVVVGADG

SEQ ID NO: 147 - protein, 9 aa, Synthetic construct
LVVVGADGV

SEQ ID NO: 148 - protein, 9 aa, Synthetic construct
VVVGADGVG

SEQ ID NO: 149 - protein, 9 aa, Synthetic construct
VVGADGVGK

SEQ ID NO: 150 - protein, 9 aa, Synthetic construct
VGADGVGKS

SEQ ID NO: 151 - protein, 9 aa, Synthetic construct
KLVVVGARG

SEQ ID NO: 152 - protein, 9 aa, Synthetic construct
LVVVGARGV

SEQ ID NO: 153 - protein, 9 aa, Synthetic construct
VVVGARGVG

SEQ ID NO: 154 - protein, 9 aa, Synthetic construct
VVGARGVGK

SEQ ID NO: 155 - protein, 9 aa, Synthetic construct
VGARGVGKS

SEQ ID NO: 156 - protein, 9 aa, Synthetic construct
KLVVVGASG

SEQ ID NO: 157 - protein, 9 aa, Synthetic construct
LVVVGASGV

SEQ ID NO: 158 - protein, 9 aa, Synthetic construct
VVVGASGVG

SEQ ID NO: 159 - protein, 9 aa, Synthetic construct
VVGASGVGK

SEQ ID NO: 160 - protein, 9 aa, Synthetic construct
VGASGVGKS

SEQ ID NO: 161 - protein, 9 aa, Synthetic construct
KLVVVGAVG

SEQ ID NO: 162 - protein, 9 aa, Synthetic construct
LVVVGAVGV

SEQ ID NO: 163 - protein, 9 aa, Synthetic construct
VVVGAVGVG

SEQ ID NO: 164 - protein, 9 aa, Synthetic construct
VVGAVGVGK

SEQ ID NO: 165 - protein, 9 aa, Synthetic construct
VGAVGVGKS

SEQ ID NO: 166 - protein, 9 aa, Synthetic construct
LVVVGAGCV

SEQ ID NO: 167 - protein, 9 aa, Synthetic construct
VVVGAGCVG

SEQ ID NO: 168 - protein, 9 aa, Synthetic construct
VVGAGCVGK

SEQ ID NO: 169 - protein, 9 aa, Synthetic construct
VGAGCVGKS

SEQ ID NO: 170 - protein, 9 aa, Synthetic construct
GAGCVGKSA

SEQ ID NO: 171 - protein, 9 aa, Synthetic construct
LVVVGAGDV

SEQ ID NO: 172 - protein, 9 aa, Synthetic construct
VVVGAGDVG

SEQ ID NO: 173 - protein, 9 aa, Synthetic construct
VVGAGDVGK

SEQ ID NO: 174 - protein, 9 aa, Synthetic construct
VGAGDVGKS

SEQ ID NO: 175 - protein, 9 aa, Synthetic construct
GAGDVGKSA

SEQ ID NO: 176 - protein, 9 aa, Synthetic construct
DILDTAGHE

SEQ ID NO: 177 - protein, 9 aa, Synthetic construct
ILDTAGHEE

SEQ ID NO: 178 - protein, 9 aa, Synthetic construct
LDTAGHEEY

SEQ ID NO: 179 - protein, 9 aa, Synthetic construct
DTAGHEEYS

SEQ ID NO: 180 - protein, 9 aa, Synthetic construct
TAGHEEYSA

SEQ ID NO: 181 - protein, 9 aa, Synthetic construct
DILDTAGHE

SEQ ID NO: 182 - protein, 9 aa, Synthetic construct
ILDTAGHEE

SEQ ID NO: 183 - protein, 9 aa, Synthetic construct
LDTAGHEEY

SEQ ID NO: 184 - protein, 9 aa, Synthetic construct
DTAGHEEYS

SEQ ID NO: 185 - protein, 9 aa, Synthetic construct
TAGHEEYSA

SEQ ID NO: 186 - protein, 9 aa, Synthetic construct
DILDTAGLE

SEQ ID NO: 187 - protein, 9 aa, Synthetic construct
ILDTAGLEE

SEQ ID NO: 188 - protein, 9 aa, Synthetic construct
LDTAGLEEY

SEQ ID NO: 189 - protein, 9 aa, Synthetic construct
DTAGLEEYS

SEQ ID NO: 190 - protein, 9 aa, Synthetic construct
TAGLEEYSA

SEQ ID NO: 191 - protein, 9 aa, Synthetic construct
KLVVVGADG

SEQ ID NO: 192 - protein, 9 aa, Synthetic construct
LVVVGADGV

SEQ ID NO: 193 - protein, 9 aa, Synthetic construct
VVVGADGVG

SEQ ID NO: 194 - protein, 9 aa, Synthetic construct
VVGADGVGK

SEQ ID NO: 195 - protein, 9 aa, Synthetic construct
VGADGVGKS

SEQ ID NO: 196 - protein, 9 aa, Synthetic construct
LVVVGAGDV

SEQ ID NO: 197 - protein, 9 aa, Synthetic construct
VVVGAGDVG

SEQ ID NO: 198 - protein, 9 aa, Synthetic construct
VVGAGDVGK

SEQ ID NO: 199 - protein, 9 aa, Synthetic construct
VGAGDVGKS

SEQ ID NO: 200 - protein, 9 aa, Synthetic construct
GAGDVGKSA

SEQ ID NO: 201 - protein, 9 aa, Synthetic construct
LVVVGAGRV

SEQ ID NO: 202 - protein, 9 aa, Synthetic construct
VVVGAGRVG

SEQ ID NO: 203 - protein, 9 aa, Synthetic construct
VVGAGRVGK

SEQ ID NO: 204 - protein, 9 aa, Synthetic construct
VGAGRVGKS

SEQ ID NO: 205 - protein, 9 aa, Synthetic construct
GAGRVGKSA

SEQ ID NO: 206 - protein, 9 aa, Synthetic construct
DILDTAGKE

SEQ ID NO: 207 - protein, 9 aa, Synthetic construct
ILDTAGKEE

SEQ ID NO: 208 - protein, 9 aa, Synthetic construct
LDTAGKEEY

SEQ ID NO: 209 - protein, 9 aa, Synthetic construct
DTAGKEEYS

SEQ ID NO: 210 - protein, 9 aa, Synthetic construct
TAGKEEYSA

SEQ ID NO: 211 - protein, 9 aa, Synthetic construct
DILDTAGLE

SEQ ID NO: 212 - protein, 9 aa, Synthetic construct
ILDTAGLEE

SEQ ID NO: 213 - protein, 9 aa, Synthetic construct
LDTAGLEEY

SEQ ID NO: 214 - protein, 9 aa, Synthetic construct
DTAGLEEYS

SEQ ID NO: 215 - protein, 9 aa, Synthetic construct
TAGLEEYSA

SEQ ID NO: 216 - protein, 9 aa, Synthetic construct
NLCSDDTRM

SEQ ID NO: 217 - protein, 9 aa, Synthetic construct
LCSDDTRMV

SEQ ID NO: 218 - protein, 9 aa, Synthetic construct
CSDDTRMVR

SEQ ID NO: 219 - protein, 9 aa, Synthetic construct
SDDTRMVRR

SEQ ID NO: 220 - protein, 9 aa, Synthetic construct
DDTRMVRRA

SEQ ID NO: 221 - protein, 9 aa, Synthetic construct
DDTPMVRWA

SEQ ID NO: 222 - protein, 9 aa, Synthetic construct
DTPMVRWAA

SEQ ID NO: 223 - protein, 9 aa, Synthetic construct
TPMVRWAAA

SEQ ID NO: 224 - protein, 9 aa, Synthetic construct
PMVRWAAAS

SEQ ID NO: 225 - protein, 9 aa, Synthetic construct
MVRWAAASK

SEQ ID NO: 226 - protein, 9 aa, Synthetic construct
HCKAGKGGT

SEQ ID NO: 227 - protein, 9 aa, Synthetic construct
CKAGKGGTG

SEQ ID NO: 228 - protein, 9 aa, Synthetic construct
KAGKGGTGV

SEQ ID NO: 229 - protein, 9 aa, Synthetic construct
AGKGGTGVM

SEQ ID NO: 230 - protein, 9 aa, Synthetic construct
GKGGTGVMI

SEQ ID NO: 231 - protein, 9 aa, Synthetic construct
HCKAGKGQT

SEQ ID NO: 232 - protein, 9 aa, Synthetic construct
CKAGKGQTG

SEQ ID NO: 233 - protein, 9 aa, Synthetic construct
KAGKGQTGV

SEQ ID NO: 234 - protein, 9 aa, Synthetic construct
AGKGQTGVM

SEQ ID NO: 235 - protein, 9 aa, Synthetic construct
GKGQTGVMI

SEQ ID NO: 236 - protein, 9 aa, Synthetic construct
VDPSGGDHF

SEQ ID NO: 237 - protein, 9 aa, Synthetic construct
DPSGGDHFC

SEQ ID NO: 238 - protein, 9 aa, Synthetic construct
PSGGDHFCL

SEQ ID NO: 239 - protein, 9 aa, Synthetic construct
SGGDHFCLG

SEQ ID NO: 240 - protein, 9 aa, Synthetic construct
GGDHFCLGQ

SEQ ID NO: 241 - protein, 9 aa, Synthetic construct
MTEVVRRFP

SEQ ID NO: 242 - protein, 9 aa, Synthetic construct
TEVVRRFPH

SEQ ID NO: 243 - protein, 9 aa, Synthetic construct
EVVRRFPHH

SEQ ID NO: 244 - protein, 9 aa, Synthetic construct
VVRRFPHHE

SEQ ID NO: 245 - protein, 9 aa, Synthetic construct
VRRFPHHER

SEQ ID NO: 246 - protein, 9 aa, Synthetic construct
MTEVVRRYP

SEQ ID NO: 247 - protein, 9 aa, Synthetic construct
TEVVRRYPH

SEQ ID NO: 248 - protein, 9 aa, Synthetic construct
EVVRRYPHH

SEQ ID NO: 249 - protein, 9 aa, Synthetic construct
VVRRYPHHE

SEQ ID NO: 250 - protein, 9 aa, Synthetic construct
VRRYPHHER

SEQ ID NO: 251 - protein, 9 aa, Synthetic construct
TIHYNYMYN

SEQ ID NO: 252 - protein, 9 aa, Synthetic construct
IHYNYMYNS

SEQ ID NO: 253 - protein, 9 aa, Synthetic construct
HYNYMYNSS

SEQ ID NO: 254 - protein, 9 aa, Synthetic construct
YNYMYNSSC

SEQ ID NO: 255 - protein, 9 aa, Synthetic construct
NYMYNSSCM

SEQ ID NO: 256 - protein, 9 aa, Synthetic construct
NSFEVRVYA

SEQ ID NO: 257 - protein, 9 aa, Synthetic construct
SFEVRVYAC

SEQ ID NO: 258 - protein, 9 aa, Synthetic construct
FEVRVYACP

SEQ ID NO: 259 - protein, 9 aa, Synthetic construct
EVRVYACPG

SEQ ID NO: 260 - protein, 9 aa, Synthetic construct
VRVYACPGR

SEQ ID NO: 261 - protein, 9 aa, Synthetic construct
PGRDRRTKE

SEQ ID NO: 262 - protein, 9 aa, Synthetic construct
GRDRRTKEE

SEQ ID NO: 263 - protein, 9 aa, Synthetic construct
RDRRTKEEN

SEQ ID NO: 264 - protein, 9 aa, Synthetic construct
DRRTKEENL

SEQ ID NO: 265 - protein, 9 aa, Synthetic construct
RRTKEENLR

SEQ ID NO: 266 - protein, 9 aa, Synthetic construct
GRDRRTEKE

SEQ ID NO: 267 - protein, 9 aa, Synthetic construct
RDRRTEKEN

SEQ ID NO: 268 - protein, 9 aa, Synthetic construct
DRRTEKENL

SEQ ID NO: 269 - protein, 9 aa, Synthetic construct
RRTEKENLR

SEQ ID NO: 270 - protein, 9 aa, Synthetic construct
RTEKENLRK

SEQ ID NO: 271 - protein, 9 aa, Synthetic construct
CNSSCMGDM

SEQ ID NO: 272 - protein, 9 aa, Synthetic construct
NSSCMGDMN

SEQ ID NO: 273 - protein, 9 aa, Synthetic construct
SSCMGDMNR

SEQ ID NO: 274 - protein, 9 aa, Synthetic construct
SCMGDMNRR

SEQ ID NO: 275 - protein, 9 aa, Synthetic construct
CMGDMNRRP

SEQ ID NO: 276 - protein, 9 aa, Synthetic construct
CNSSCMGSM

SEQ ID NO: 277 - protein, 9 aa, Synthetic construct
NSSCMGSMN

SEQ ID NO: 278 - protein, 9 aa, Synthetic construct
SSCMGSMNR

SEQ ID NO: 279 - protein, 9 aa, Synthetic construct
SCMGSMNRR

SEQ ID NO: 280 - protein, 9 aa, Synthetic construct
CMGSMNRRP

SEQ ID NO: 281 - protein, 9 aa, Synthetic construct
CNSSCMGVM

SEQ ID NO: 282 - protein, 9 aa, Synthetic construct
NSSCMGVMN

SEQ ID NO: 283 - protein, 9 aa, Synthetic construct
SSCMGVMNR

SEQ ID NO: 284 - protein, 9 aa, Synthetic construct
SCMGVMNRR

SEQ ID NO: 285 - protein, 9 aa, Synthetic construct
CMGVMNRRP

SEQ ID NO: 286 - protein, 9 aa, Synthetic construct
VVRRCPHRE

SEQ ID NO: 287 - protein, 9 aa, Synthetic construct
VRRCPHRER

SEQ ID NO: 288 - protein, 9 aa, Synthetic construct
RRCPHRERC

SEQ ID NO: 289 - protein, 9 aa, Synthetic construct
RCPHRERCS

SEQ ID NO: 290 - protein, 9 aa, Synthetic construct
CPHRERCSD

SEQ ID NO: 291 - protein, 9 aa, Synthetic construct
VVRRCPHYE

SEQ ID NO: 292 - protein, 9 aa, Synthetic construct
VRRCPHYER

SEQ ID NO: 293 - protein, 9 aa, Synthetic construct
RRCPHYERC

SEQ ID NO: 294 - protein, 9 aa, Synthetic construct
RCPHYERCS

SEQ ID NO: 295 - protein, 9 aa, Synthetic construct
CPHYERCSD

SEQ ID NO: 296 - protein, 9 aa, Synthetic construct
DGLAPPQRL

SEQ ID NO: 297 - protein, 9 aa, Synthetic construct
GLAPPQRLI

SEQ ID NO: 298 - protein, 9 aa, Synthetic construct
LAPPQRLIR

SEQ ID NO: 299 - protein, 9 aa, Synthetic construct
APPQRLIRV

SEQ ID NO: 300 - protein, 9 aa, Synthetic construct
PPQRLIRVE

SEQ ID NO: 301 - protein, 9 aa, Synthetic construct
LAPPQHLTR

SEQ ID NO: 302 - protein, 9 aa, Synthetic construct
APPQHLTRV

SEQ ID NO: 303 - protein, 9 aa, Synthetic construct
PPQHLTRVE

SEQ ID NO: 304 - protein, 9 aa, Synthetic construct
PQHLTRVEG

SEQ ID NO: 305 - protein, 9 aa, Synthetic construct
QHLTRVEGN

SEQ ID NO: 306 - protein, 9 aa, Synthetic construct
GLAPPQHRI

SEQ ID NO: 307 - protein, 9 aa, Synthetic construct
LAPPQHRIR

SEQ ID NO: 308 - protein, 9 aa, Synthetic construct
APPQHRIRV

SEQ ID NO: 309 - protein, 9 aa, Synthetic construct
PPQHRIRVE

SEQ ID NO: 310 - protein, 9 aa, Synthetic construct
PQHRIRVEG

SEQ ID NO: 311 - protein, 9 aa, Synthetic construct
QLWVDSTSP

SEQ ID NO: 312 - protein, 9 aa, Synthetic construct
LWVDSTSPP

SEQ ID NO: 313 - protein, 9 aa, Synthetic construct
WVDSTSPPG

SEQ ID NO: 314 - protein, 9 aa, Synthetic construct
VDSTSPPGT

SEQ ID NO: 315 - protein, 9 aa, Synthetic construct
DSTSPPGTR

SEQ ID NO: 316 - protein, 9 aa, Synthetic construct
PPPGTRVHA

SEQ ID NO: 317 - protein, 9 aa, Synthetic construct
PPGTRVHAM

SEQ ID NO: 318 - protein, 9 aa, Synthetic construct
PGTRVHAMA

SEQ ID NO: 319 - protein, 9 aa, Synthetic construct
GTRVHAMAI

SEQ ID NO: 320 - protein, 9 aa, Synthetic construct
TRVHAMAIY

SEQ ID NO: 321 - protein, 9 aa, Synthetic construct
PPPGTRVLA

SEQ ID NO: 322 - protein, 9 aa, Synthetic construct
PPGTRVLAM

SEQ ID NO: 323 - protein, 9 aa, Synthetic construct
PGTRVLAMA

SEQ ID NO: 324 - protein, 9 aa, Synthetic construct
GTRVLAMAI

SEQ ID NO: 325 - protein, 9 aa, Synthetic construct
TRVLAMAIY

SEQ ID NO: 326 - protein, 9 aa, Synthetic construct
HMTEVVRHC

SEQ ID NO: 327 - protein, 9 aa, Synthetic construct
MTEVVRHCP

SEQ ID NO: 328 - protein, 9 aa, Synthetic construct
TEVVRHCPH

SEQ ID NO: 329 - protein, 9 aa, Synthetic construct
EVVRHCPHH

SEQ ID NO: 330 - protein, 9 aa, Synthetic construct
VVRHCPHHE

SEQ ID NO: 331 - protein, 9 aa, Synthetic construct
SCMGGMNQR

SEQ ID NO: 332 - protein, 9 aa, Synthetic construct
CMGGMNQRP

SEQ ID NO: 333 - protein, 9 aa, Synthetic construct
MGGMNQRPI

SEQ ID NO: 334 - protein, 9 aa, Synthetic construct
GGMNQRPIL

SEQ ID NO: 335 - protein, 9 aa, Synthetic construct
GMNQRPILT

SEQ ID NO: 336 - protein, 9 aa, Synthetic construct
SCMGGMNWR

SEQ ID NO: 337 - protein, 9 aa, Synthetic construct
CMGGMNWRP

SEQ ID NO: 338 - protein, 9 aa, Synthetic construct
MGGMNWRPI

SEQ ID NO: 339 - protein, 9 aa, Synthetic construct
GGMNWRPIL

SEQ ID NO: 340 - protein, 9 aa, Synthetic construct
GMNWRPILT

SEQ ID NO: 341 - protein, 9 aa, Synthetic construct
CMGGMNRSP

SEQ ID NO: 342 - protein, 9 aa, Synthetic construct
MGGMNRSPI

SEQ ID NO: 343 - protein, 9 aa, Synthetic construct
GGMNRSPIL

SEQ ID NO: 344 - protein, 9 aa, Synthetic construct
GMNRSPILT

SEQ ID NO: 345 - protein, 9 aa, Synthetic construct
MNRSPILTI

SEQ ID NO: 346 - protein, 9 aa, Synthetic construct
CMGGMNRSP

SEQ ID NO: 347 - protein, 9 aa, Synthetic construct
MGGMNRSPI

SEQ ID NO: 348 - protein, 9 aa, Synthetic construct
GGMNRSPIL

SEQ ID NO: 349 - protein, 9 aa, Synthetic construct
GMNRSPILT

SEQ ID NO: 350 - protein, 9 aa, Synthetic construct
MNRSPILTI

SEQ ID NO: 351 - protein, 9 aa, Synthetic construct
GRNSFEVCV

SEQ ID NO: 352 - protein, 9 aa, Synthetic construct
RNSFEVCVC

SEQ ID NO: 353 - protein, 9 aa, Synthetic construct
NSFEVCVCA

SEQ ID NO: 354 - protein, 9 aa, Synthetic construct
SFEVCVCAC

SEQ ID NO: 355 - protein, 9 aa, Synthetic construct
FEVCVCACP

SEQ ID NO: 356 - protein, 9 aa, Synthetic construct
GRNSFEVHV

SEQ ID NO: 357 - protein, 9 aa, Synthetic construct
RNSFEVHVC

SEQ ID NO: 358 - protein, 9 aa, Synthetic construct
NSFEVHVCA

SEQ ID NO: 359 - protein, 9 aa, Synthetic construct
SFEVHVCAC

SEQ ID NO: 360 - protein, 9 aa, Synthetic construct
FEVHVCACP

SEQ ID NO: 361 - protein, 9 aa, Synthetic construct
GRNSFEVLV

SEQ ID NO: 362 - protein, 9 aa, Synthetic construct
RNSFEVLVC

SEQ ID NO: 363 - protein, 9 aa, Synthetic construct
NSFEVLVCA

SEQ ID NO: 364 - protein, 9 aa, Synthetic construct
SFEVLVCAC

SEQ ID NO: 365 - protein, 9 aa, Synthetic construct
FEVLVCACP

SEQ ID NO: 366 - protein, 9 aa, Synthetic construct
RVCACPGKD

SEQ ID NO: 367 - protein, 9 aa, Synthetic construct
VCACPGKDR

SEQ ID NO: 368 - protein, 9 aa, Synthetic construct
CACPGKDRR

SEQ ID NO: 369 - protein, 9 aa, Synthetic construct
ACPGKDRRT

SEQ ID NO: 370 - protein, 9 aa, Synthetic construct
CPGKDRRTE

SEQ ID NO: 371 - protein, 9 aa, Synthetic construct
RVCACPGTD

SEQ ID NO: 372 - protein, 9 aa, Synthetic construct
VCACPGTDR

SEQ ID NO: 373 - protein, 9 aa, Synthetic construct
CACPGTDRR

SEQ ID NO: 374 - protein, 9 aa, Synthetic construct
ACPGTDRRT

SEQ ID NO: 375 - protein, 9 aa, Synthetic construct
CPGTDRRTE

SEQ ID NO: 376 - protein, 9 aa, Synthetic construct
CACPGRDWR

SEQ ID NO: 377 - protein, 9 aa, Synthetic construct
ACPGRDWRT

SEQ ID NO: 378 - protein, 9 aa, Synthetic construct
CPGRDWRTE

SEQ ID NO: 379 - protein, 9 aa, Synthetic construct
PGRDWRTEE

SEQ ID NO: 380 - protein, 9 aa, Synthetic construct
GRDWRTEEE

SEQ ID NO: 381 - protein, 9 aa, Synthetic construct
YNYMCNSFC

SEQ ID NO: 382 - protein, 9 aa, Synthetic construct
NYMCNSFCM

SEQ ID NO: 383 - protein, 9 aa, Synthetic construct
YMCNSFCMG

SEQ ID NO: 384 - protein, 9 aa, Synthetic construct
MCNSFCMGG

SEQ ID NO: 385 - protein, 9 aa, Synthetic construct
CNSFCMGGM

SEQ ID NO: 386 - protein, 9 aa, Synthetic construct
TPPPGTRFR

SEQ ID NO: 387 - protein, 9 aa, Synthetic construct
PPPGTRFRA

SEQ ID NO: 388 - protein, 9 aa, Synthetic construct
PPGTRFRAM

SEQ ID NO: 389 - protein, 9 aa, Synthetic construct
PGTRFRAMA

SEQ ID NO: 390 - protein, 9 aa, Synthetic construct
GTRFRAMAI

SEQ ID NO: 391 - protein, 9 aa, Synthetic construct
SQHMTEVMR

SEQ ID NO: 392 - protein, 9 aa, Synthetic construct
QHMTEVMRR

SEQ ID NO: 393 - protein, 9 aa, Synthetic construct
HMTEVMRRC

SEQ ID NO: 394 - protein, 9 aa, Synthetic construct
MTEVMRRCP

SEQ ID NO: 395 - protein, 9 aa, Synthetic construct
TEVMRRCPH

SEQ ID NO: 396 - protein, 9 aa, Synthetic construct
LGRNSFEMR

SEQ ID NO: 397 - protein, 9 aa, Synthetic construct
GRNSFEMRV

SEQ ID NO: 398 - protein, 9 aa, Synthetic construct
RNSFEMRVC

SEQ ID NO: 399 - protein, 9 aa, Synthetic construct
NSFEMRVCA

SEQ ID NO: 400 - protein, 9 aa, Synthetic construct
SFEMRVCAC

SEQ ID NO: 401 - protein, 9 aa, Synthetic construct
RVRAMAICK

SEQ ID NO: 402 - protein, 9 aa, Synthetic construct
VRAMAICKQ

SEQ ID NO: 403 - protein, 9 aa, Synthetic construct
RAMAICKQS

SEQ ID NO: 404 - protein, 9 aa, Synthetic construct
AMAICKQSQ

SEQ ID NO: 405 - protein, 9 aa, Synthetic construct
MAICKQSQH

SEQ ID NO: 406 - protein, 9 aa, Synthetic construct
EGNLRVECL

SEQ ID NO: 407 - protein, 9 aa, Synthetic construct
GNLRVECLD

SEQ ID NO: 408 - protein, 9 aa, Synthetic construct
NLRVECLDD

SEQ ID NO: 409 - protein, 9 aa, Synthetic construct
LRVECLDDR

SEQ ID NO: 410 - protein, 9 aa, Synthetic construct
RVECLDDRN

SEQ ID NO: 411 - protein, 9 aa, Synthetic construct
RHSVVVPCE

SEQ ID NO: 412 - protein, 9 aa, Synthetic construct
HSVVVPCEP

SEQ ID NO: 413 - protein, 9 aa, Synthetic construct
SVVVPCEPP

SEQ ID NO: 414 - protein, 9 aa, Synthetic construct
VVVPCEPPE

SEQ ID NO: 415 - protein, 9 aa, Synthetic construct
VVPCEPPEV

SEQ ID NO: 416 - protein, 9 aa, Synthetic construct
SDCTTIHCN

SEQ ID NO: 417 - protein, 9 aa, Synthetic construct
DCTTIHCNY

SEQ ID NO: 418 - protein, 9 aa, Synthetic construct
CTTIHCNYM

SEQ ID NO: 419 - protein, 9 aa, Synthetic construct
TTIHCNYMC

SEQ ID NO: 420 - protein, 9 aa, Synthetic construct
TIHCNYMCN

SEQ ID NO: 421 - protein, 5 aa, Synthetic construct
HKRGK

SEQ ID NO: 422 - protein, 5 aa, Synthetic construct
KRGKY

SEQ ID NO: 423 - protein, 5 aa, Synthetic construct
RGKYI

SEQ ID NO: 424 - protein, 5 aa, Synthetic construct
GKYIK

SEQ ID NO: 425 - protein, 5 aa, Synthetic construct
KYIKT

SEQ ID NO: 426 - protein, 5 aa, Synthetic construct
SSGFC

SEQ ID NO: 427 - protein, 5 aa, Synthetic construct
SGFCN

SEQ ID NO: 428 - protein, 5 aa, Synthetic construct
GFCNI

SEQ ID NO: 429 - protein, 5 aa, Synthetic construct
FCNIA

SEQ ID NO: 430 - protein, 5 aa, Synthetic construct
CNIAV

SEQ ID NO: 431 - protein, 5 aa, Synthetic construct
RLIVS

SEQ ID NO: 432 - protein, 5 aa, Synthetic construct
LIVSK

SEQ ID NO: 433 - protein, 5 aa, Synthetic construct
IVSKN

SEQ ID NO: 434 - protein, 5 aa, Synthetic construct
VSKNA

SEQ ID NO: 435 - protein, 5 aa, Synthetic construct
SKNAG

SEQ ID NO: 436 - protein, 5 aa, Synthetic construct
GLATE

SEQ ID NO: 437 - protein, 5 aa, Synthetic construct
LATEK

SEQ ID NO: 438 - protein, 5 aa, Synthetic construct
ATEKS

SEQ ID NO: 439 - protein, 5 aa, Synthetic construct
TEKSR

SEQ ID NO: 440 - protein, 5 aa, Synthetic construct
EKSRW

SEQ ID NO: 441 - protein, 5 aa, Synthetic construct
GLATM

SEQ ID NO: 442 - protein, 5 aa, Synthetic construct
LATMK

SEQ ID NO: 443 - protein, 5 aa, Synthetic construct
ATMKS

SEQ ID NO: 444 - protein, 5 aa, Synthetic construct
TMKSR

SEQ ID NO: 445 - protein, 5 aa, Synthetic construct
MKSRW

SEQ ID NO: 446 - protein, 5 aa, Synthetic construct
TRPVY

SEQ ID NO: 447 - protein, 5 aa, Synthetic construct
RPVYD

SEQ ID NO: 448 - protein, 5 aa, Synthetic construct
PVYDA

SEQ ID NO: 449 - protein, 5 aa, Synthetic construct
VYDAA

SEQ ID NO: 450 - protein, 5 aa, Synthetic construct
YDAAR

SEQ ID NO: 451 - protein, 5 aa, Synthetic construct
SYLDC

SEQ ID NO: 452 - protein, 5 aa, Synthetic construct
YLDCG

SEQ ID NO: 453 - protein, 5 aa, Synthetic construct
LDCGI

SEQ ID NO: 454 - protein, 5 aa, Synthetic construct
DCGIH

SEQ ID NO: 455 - protein, 5 aa, Synthetic construct
CGIHS

SEQ ID NO: 456 - protein, 5 aa, Synthetic construct
SGIHC

SEQ ID NO: 457 - protein, 5 aa, Synthetic construct
GIHCG

SEQ ID NO: 458 - protein, 5 aa, Synthetic construct
IHCGA

SEQ ID NO: 459 - protein, 5 aa, Synthetic construct
HCGAT

SEQ ID NO: 460 - protein, 5 aa, Synthetic construct
CGATT

SEQ ID NO: 461 - protein, 5 aa, Synthetic construct
SGIHF

SEQ ID NO: 462 - protein, 5 aa, Synthetic construct
GIHFG

SEQ ID NO: 463 - protein, 5 aa, Synthetic construct
IHFGA

SEQ ID NO: 464 - protein, 5 aa, Synthetic construct
HFGAT

SEQ ID NO: 465 - protein, 5 aa, Synthetic construct
FGATT

SEQ ID NO: 466 - protein, 5 aa, Synthetic construct
TTAPP

SEQ ID NO: 467 - protein, 5 aa, Synthetic construct
TAPPL

SEQ ID NO: 468 - protein, 5 aa, Synthetic construct
APPLS

SEQ ID NO: 469 - protein, 5 aa, Synthetic construct
PPLSG

SEQ ID NO: 470 - protein, 5 aa, Synthetic construct
PLSGK

SEQ ID NO: 471 - protein, 5 aa, Synthetic construct
SGATA

SEQ ID NO: 472 - protein, 5 aa, Synthetic construct
GATAT

SEQ ID NO: 473 - protein, 5 aa, Synthetic construct
ATATA

SEQ ID NO: 474 - protein, 5 aa, Synthetic construct
TATAP

SEQ ID NO: 475 - protein, 5 aa, Synthetic construct
ATAPS

SEQ ID NO: 476 - protein, 5 aa, Synthetic construct
YSFGV

SEQ ID NO: 477 - protein, 5 aa, Synthetic construct
SFGVT

SEQ ID NO: 478 - protein, 5 aa, Synthetic construct
FGVTC

SEQ ID NO: 479 - protein, 5 aa, Synthetic construct
GVTCV

SEQ ID NO: 480 - protein, 5 aa, Synthetic construct
VTCVK

SEQ ID NO: 481 - protein, 5 aa, Synthetic construct
TCPAV

SEQ ID NO: 482 - protein, 5 aa, Synthetic construct
CPAVV

SEQ ID NO: 483 - protein, 5 aa, Synthetic construct
PAVVM

SEQ ID NO: 484 - protein, 5 aa, Synthetic construct
AVVMG

SEQ ID NO: 485 - protein, 5 aa, Synthetic construct
VVMGE

SEQ ID NO: 486 - protein, 5 aa, Synthetic construct
TDFGR

SEQ ID NO: 487 - protein, 5 aa, Synthetic construct
DFGRA

SEQ ID NO: 488 - protein, 5 aa, Synthetic construct
FGRAK

SEQ ID NO: 489 - protein, 5 aa, Synthetic construct
GRAKL

SEQ ID NO: 490 - protein, 5 aa, Synthetic construct
RAKLL

SEQ ID NO: 491 - protein, 5 aa, Synthetic construct
TSTVC

SEQ ID NO: 492 - protein, 5 aa, Synthetic construct
STVCC

SEQ ID NO: 493 - protein, 5 aa, Synthetic construct
TVCCM

SEQ ID NO: 494 - protein, 5 aa, Synthetic construct
VCCMH

SEQ ID NO: 495 - protein, 5 aa, Synthetic construct
CCMHL

SEQ ID NO: 496 - protein, 5 aa, Synthetic construct
TSTVG

SEQ ID NO: 497 - protein, 5 aa, Synthetic construct
STVGC

SEQ ID NO: 498 - protein, 5 aa, Synthetic construct
TVGCM

SEQ ID NO: 499 - protein, 5 aa, Synthetic construct
VGCMH

SEQ ID NO: 500 - protein, 5 aa, Synthetic construct
GCMHL

SEQ ID NO: 501 - protein, 5 aa, Synthetic construct
VSGSQ

SEQ ID NO: 502 - protein, 5 aa, Synthetic construct
SGSQD

SEQ ID NO: 503 - protein, 5 aa, Synthetic construct
GSQDA

SEQ ID NO: 504 - protein, 5 aa, Synthetic construct
SQDAT

SEQ ID NO: 505 - protein, 5 aa, Synthetic construct
QDATL

SEQ ID NO: 506 - protein, 5 aa, Synthetic construct
VAAVC

SEQ ID NO: 507 - protein, 5 aa, Synthetic construct
AAVCC

SEQ ID NO: 508 - protein, 5 aa, Synthetic construct
AVCCV

SEQ ID NO: 509 - protein, 5 aa, Synthetic construct
VCCVQ

SEQ ID NO: 510 - protein, 5 aa, Synthetic construct
CCVQY

SEQ ID NO: 511 - protein, 5 aa, Synthetic construct
VAAVG

SEQ ID NO: 512 - protein, 5 aa, Synthetic construct
AAVGC

SEQ ID NO: 513 - protein, 5 aa, Synthetic construct
AVGCV

SEQ ID NO: 514 - protein, 5 aa, Synthetic construct
VGCVQ

SEQ ID NO: 515 - protein, 5 aa, Synthetic construct
GCVQY

SEQ ID NO: 516 - protein, 5 aa, Synthetic construct
VVERW

SEQ ID NO: 517 - protein, 5 aa, Synthetic construct
VERWP

SEQ ID NO: 518 - protein, 5 aa, Synthetic construct
ERWPH

SEQ ID NO: 519 - protein, 5 aa, Synthetic construct
RWPHR

SEQ ID NO: 520 - protein, 5 aa, Synthetic construct
WPHRP

SEQ ID NO: 521 - protein, 5 aa, Synthetic construct
VLERC

SEQ ID NO: 522 - protein, 5 aa, Synthetic construct
LERCP

SEQ ID NO: 523 - protein, 5 aa, Synthetic construct
ERCPH

SEQ ID NO: 524 - protein, 5 aa, Synthetic construct
RCPHR

SEQ ID NO: 525 - protein, 5 aa, Synthetic construct
CPHRP

SEQ ID NO: 526 - protein, 5 aa, Synthetic construct
DVGGL

SEQ ID NO: 527 - protein, 5 aa, Synthetic construct
VGGLR

SEQ ID NO: 528 - protein, 5 aa, Synthetic construct
GGLRS

SEQ ID NO: 529 - protein, 5 aa, Synthetic construct
GLRSE

SEQ ID NO: 530 - protein, 5 aa, Synthetic construct
LRSER

SEQ ID NO: 531 - protein, 5 aa, Synthetic construct
DVGGL

SEQ ID NO: 532 - protein, 5 aa, Synthetic construct
VGGLR

SEQ ID NO: 533 - protein, 5 aa, Synthetic construct
GGLRS

SEQ ID NO: 534 - protein, 5 aa, Synthetic construct
GLRSE

SEQ ID NO: 535 - protein, 5 aa, Synthetic construct
LRSER

SEQ ID NO: 536 - protein, 5 aa, Synthetic construct
DVGGP

SEQ ID NO: 537 - protein, 5 aa, Synthetic construct
VGGPR

SEQ ID NO: 538 - protein, 5 aa, Synthetic construct
GGPRS

SEQ ID NO: 539 - protein, 5 aa, Synthetic construct
GPRSE

SEQ ID NO: 540 - protein, 5 aa, Synthetic construct
PRSER

SEQ ID NO: 541 - protein, 5 aa, Synthetic construct
LLRCC

SEQ ID NO: 542 - protein, 5 aa, Synthetic construct
LRCCV

SEQ ID NO: 543 - protein, 5 aa, Synthetic construct
RCCVL

SEQ ID NO: 544 - protein, 5 aa, Synthetic construct
CCVLT

SEQ ID NO: 545 - protein, 5 aa, Synthetic construct
CVLTS

SEQ ID NO: 546 - protein, 5 aa, Synthetic construct
DTAGR

SEQ ID NO: 547 - protein, 5 aa, Synthetic construct
TAGRE

SEQ ID NO: 548 - protein, 5 aa, Synthetic construct
AGREE

SEQ ID NO: 549 - protein, 5 aa, Synthetic construct
GREEY

SEQ ID NO: 550 - protein, 5 aa, Synthetic construct
REEYS

SEQ ID NO: 551 - protein, 5 aa, Synthetic construct
IETST

SEQ ID NO: 552 - protein, 5 aa, Synthetic construct
ETSTK

SEQ ID NO: 553 - protein, 5 aa, Synthetic construct
TSTKT

SEQ ID NO: 554 - protein, 5 aa, Synthetic construct
STKTR

SEQ ID NO: 555 - protein, 5 aa, Synthetic construct
TKTRQ

SEQ ID NO: 556 - protein, 5 aa, Synthetic construct
VVGAA

SEQ ID NO: 557 - protein, 5 aa, Synthetic construct
VGAAG

SEQ ID NO: 558 - protein, 5 aa, Synthetic construct
GAAGV

SEQ ID NO: 559 - protein, 5 aa, Synthetic construct
AAGVG

SEQ ID NO: 560 - protein, 5 aa, Synthetic construct
AGVGK

SEQ ID NO: 561 - protein, 5 aa, Synthetic construct
VVGAC

SEQ ID NO: 562 - protein, 5 aa, Synthetic construct
VGACG

SEQ ID NO: 563 - protein, 5 aa, Synthetic construct
GACGV

SEQ ID NO: 564 - protein, 5 aa, Synthetic construct
ACGVG

SEQ ID NO: 565 - protein, 5 aa, Synthetic construct
CGVGK

SEQ ID NO: 566 - protein, 5 aa, Synthetic construct
VVGAD

SEQ ID NO: 567 - protein, 5 aa, Synthetic construct
VGADG

SEQ ID NO: 568 - protein, 5 aa, Synthetic construct
GADGV

SEQ ID NO: 569 - protein, 5 aa, Synthetic construct
ADGVG

SEQ ID NO: 570 - protein, 5 aa, Synthetic construct
DGVGK

SEQ ID NO: 571 - protein, 5 aa, Synthetic construct
VVGAR

SEQ ID NO: 572 - protein, 5 aa, Synthetic construct
VGARG

SEQ ID NO: 573 - protein, 5 aa, Synthetic construct
GARGV

SEQ ID NO: 574 - protein, 5 aa, Synthetic construct
ARGVG

SEQ ID NO: 575 - protein, 5 aa, Synthetic construct
RGVGK

SEQ ID NO: 576 - protein, 5 aa, Synthetic construct
VVGAS

SEQ ID NO: 577 - protein, 5 aa, Synthetic construct
VGASG

SEQ ID NO: 578 - protein, 5 aa, Synthetic construct
GASGV

SEQ ID NO: 579 - protein, 5 aa, Synthetic construct
ASGVG

SEQ ID NO: 580 - protein, 5 aa, Synthetic construct
SGVGK

SEQ ID NO: 581 - protein, 5 aa, Synthetic construct
VVGAV

SEQ ID NO: 582 - protein, 5 aa, Synthetic construct
VGAVG

SEQ ID NO: 583 - protein, 5 aa, Synthetic construct
GAVGV

SEQ ID NO: 584 - protein, 5 aa, Synthetic construct
AVGVG

SEQ ID NO: 585 - protein, 5 aa, Synthetic construct
VGVGK

SEQ ID NO: 586 - protein, 5 aa, Synthetic construct
VGAGC

SEQ ID NO: 587 - protein, 5 aa, Synthetic construct
GAGCV

SEQ ID NO: 588 - protein, 5 aa, Synthetic construct
AGCVG

SEQ ID NO: 589 - protein, 5 aa, Synthetic construct
GCVGK

SEQ ID NO: 590 - protein, 5 aa, Synthetic construct
CVGKS

SEQ ID NO: 591 - protein, 5 aa, Synthetic construct
VGAGD

SEQ ID NO: 592 - protein, 5 aa, Synthetic construct
GAGDV

SEQ ID NO: 593 - protein, 5 aa, Synthetic construct
AGDVG

SEQ ID NO: 594 - protein, 5 aa, Synthetic construct
GDVGK

SEQ ID NO: 595 - protein, 5 aa, Synthetic construct
DVGKS

SEQ ID NO: 596 - protein, 5 aa, Synthetic construct
DTAGH

SEQ ID NO: 597 - protein, 5 aa, Synthetic construct
TAGHE

SEQ ID NO: 598 - protein, 5 aa, Synthetic construct
AGHEE

SEQ ID NO: 599 - protein, 5 aa, Synthetic construct
GHEEY

SEQ ID NO: 600 - protein, 5 aa, Synthetic construct
HEEYS

SEQ ID NO: 601 - protein, 5 aa, Synthetic construct
DTAGH

SEQ ID NO: 602 - protein, 5 aa, Synthetic construct
TAGHE

SEQ ID NO: 603 - protein, 5 aa, Synthetic construct
AGHEE

SEQ ID NO: 604 - protein, 5 aa, Synthetic construct
GHEEY

SEQ ID NO: 605 - protein, 5 aa, Synthetic construct
HEEYS

SEQ ID NO: 606 - protein, 5 aa, Synthetic construct
DTAGL

SEQ ID NO: 607 - protein, 5 aa, Synthetic construct
TAGLE

SEQ ID NO: 608 - protein, 5 aa, Synthetic construct
AGLEE

SEQ ID NO: 609 - protein, 5 aa, Synthetic construct
GLEEY

SEQ ID NO: 610 - protein, 5 aa, Synthetic construct
LEEYS

SEQ ID NO: 611 - protein, 5 aa, Synthetic construct
VVGAD

SEQ ID NO: 612 - protein, 5 aa, Synthetic construct
VGADG

SEQ ID NO: 613 - protein, 5 aa, Synthetic construct
GADGV

SEQ ID NO: 614 - protein, 5 aa, Synthetic construct
ADGVG

SEQ ID NO: 615 - protein, 5 aa, Synthetic construct
DGVGK

SEQ ID NO: 616 - protein, 5 aa, Synthetic construct
VGAGD

SEQ ID NO: 617 - protein, 5 aa, Synthetic construct
GAGDV

SEQ ID NO: 618 - protein, 5 aa, Synthetic construct
AGDVG

SEQ ID NO: 619 - protein, 5 aa, Synthetic construct
GDVGK

SEQ ID NO: 620 - protein, 5 aa, Synthetic construct
DVGKS

SEQ ID NO: 621 - protein, 5 aa, Synthetic construct
VGAGR

SEQ ID NO: 622 - protein, 5 aa, Synthetic construct
GAGRV

SEQ ID NO: 623 - protein, 5 aa, Synthetic construct
AGRVG

SEQ ID NO: 624 - protein, 5 aa, Synthetic construct
GRVGK

SEQ ID NO: 625 - protein, 5 aa, Synthetic construct
RVGKS

SEQ ID NO: 626 - protein, 5 aa, Synthetic construct
DTAGK

SEQ ID NO: 627 - protein, 5 aa, Synthetic construct
TAGKE

SEQ ID NO: 628 - protein, 5 aa, Synthetic construct
AGKEE

SEQ ID NO: 629 - protein, 5 aa, Synthetic construct
GKEEY

SEQ ID NO: 630 - protein, 5 aa, Synthetic construct
KEEYS

SEQ ID NO: 631 - protein, 5 aa, Synthetic construct
DTAGL

SEQ ID NO: 632 - protein, 5 aa, Synthetic construct
TAGLE

SEQ ID NO: 633 - protein, 5 aa, Synthetic construct
AGLEE

SEQ ID NO: 634 - protein, 5 aa, Synthetic construct
GLEEY

SEQ ID NO: 635 - protein, 5 aa, Synthetic construct
LEEYS

SEQ ID NO: 636 - protein, 5 aa, Synthetic construct
SDDTR

SEQ ID NO: 637 - protein, 5 aa, Synthetic construct
DDTRM

SEQ ID NO: 638 - protein, 5 aa, Synthetic construct
DTRMV

SEQ ID NO: 639 - protein, 5 aa, Synthetic construct
TRMVR

SEQ ID NO: 640 - protein, 5 aa, Synthetic construct
RMVRR

SEQ ID NO: 641 - protein, 5 aa, Synthetic construct
PMVRW

SEQ ID NO: 642 - protein, 5 aa, Synthetic construct
MVRWA

SEQ ID NO: 643 - protein, 5 aa, Synthetic construct
VRWAA

SEQ ID NO: 644 - protein, 5 aa, Synthetic construct
RWAAA

SEQ ID NO: 645 - protein, 5 aa, Synthetic construct
WAAAS

SEQ ID NO: 646 - protein, 5 aa, Synthetic construct
AGKGG

SEQ ID NO: 647 - protein, 5 aa, Synthetic construct
GKGGT

SEQ ID NO: 648 - protein, 5 aa, Synthetic construct
KGGTG

SEQ ID NO: 649 - protein, 5 aa, Synthetic construct
GGTGV

SEQ ID NO: 650 - protein, 5 aa, Synthetic construct
GTGVM

SEQ ID NO: 651 - protein, 5 aa, Synthetic construct
AGKGQ

SEQ ID NO: 652 - protein, 5 aa, Synthetic construct
GKGQT

SEQ ID NO: 653 - protein, 5 aa, Synthetic construct
KGQTG

SEQ ID NO: 654 - protein, 5 aa, Synthetic construct
GQTGV

SEQ ID NO: 655 - protein, 5 aa, Synthetic construct
QTGVM

SEQ ID NO: 656 - protein, 5 aa, Synthetic construct
SGGDH

SEQ ID NO: 657 - protein, 5 aa, Synthetic construct
GGDHF

SEQ ID NO: 658 - protein, 5 aa, Synthetic construct
GDHFC

SEQ ID NO: 659 - protein, 5 aa, Synthetic construct
DHFCL

SEQ ID NO: 660 - protein, 5 aa, Synthetic construct
HFCLG

SEQ ID NO: 661 - protein, 5 aa, Synthetic construct
VVRRF

SEQ ID NO: 662 - protein, 5 aa, Synthetic construct
VRRFP

SEQ ID NO: 663 - protein, 5 aa, Synthetic construct
RRFPH

SEQ ID NO: 664 - protein, 5 aa, Synthetic construct
RFPHH

SEQ ID NO: 665 - protein, 5 aa, Synthetic construct
FPHHE

SEQ ID NO: 666 - protein, 5 aa, Synthetic construct
VVRRY

SEQ ID NO: 667 - protein, 5 aa, Synthetic construct
VRRYP

SEQ ID NO: 668 - protein, 5 aa, Synthetic construct
RRYPH

SEQ ID NO: 669 - protein, 5 aa, Synthetic construct
RYPHH

SEQ ID NO: 670 - protein, 5 aa, Synthetic construct
YPHHE

SEQ ID NO: 671 - protein, 5 aa, Synthetic construct
YNYMY

SEQ ID NO: 672 - protein, 5 aa, Synthetic construct
NYMYN

SEQ ID NO: 673 - protein, 5 aa, Synthetic construct
YMYNS

SEQ ID NO: 674 - protein, 5 aa, Synthetic construct
MYNSS

SEQ ID NO: 675 - protein, 5 aa, Synthetic construct
YNSSC

SEQ ID NO: 676 - protein, 5 aa, Synthetic construct
EVRVY

SEQ ID NO: 677 - protein, 5 aa, Synthetic construct
VRVYA

SEQ ID NO: 678 - protein, 5 aa, Synthetic construct
RVYAC

SEQ ID NO: 679 - protein, 5 aa, Synthetic construct
VYACP

SEQ ID NO: 680 - protein, 5 aa, Synthetic construct
YACPG

SEQ ID NO: 681 - protein, 5 aa, Synthetic construct
DRRTK

SEQ ID NO: 682 - protein, 5 aa, Synthetic construct
RRTKE

SEQ ID NO: 683 - protein, 5 aa, Synthetic construct
RTKEE

SEQ ID NO: 684 - protein, 5 aa, Synthetic construct
TKEEN

SEQ ID NO: 685 - protein, 5 aa, Synthetic construct
KEENL

SEQ ID NO: 686 - protein, 5 aa, Synthetic construct
RRTEK

SEQ ID NO: 687 - protein, 5 aa, Synthetic construct
RTEKE

SEQ ID NO: 688 - protein, 5 aa, Synthetic construct
TEKEN

SEQ ID NO: 689 - protein, 5 aa, Synthetic construct
EKENL

SEQ ID NO: 690 - protein, 5 aa, Synthetic construct
KENLR

SEQ ID NO: 691 - protein, 5 aa, Synthetic construct
SCMGD

SEQ ID NO: 692 - protein, 5 aa, Synthetic construct
CMGDM

SEQ ID NO: 693 - protein, 5 aa, Synthetic construct
MGDMN

SEQ ID NO: 694 - protein, 5 aa, Synthetic construct
GDMNR

SEQ ID NO: 695 - protein, 5 aa, Synthetic construct
DMNRR

SEQ ID NO: 696 - protein, 5 aa, Synthetic construct
SCMGS

SEQ ID NO: 697 - protein, 5 aa, Synthetic construct
CMGSM

SEQ ID NO: 698 - protein, 5 aa, Synthetic construct
MGSMN

SEQ ID NO: 699 - protein, 5 aa, Synthetic construct
GSMNR

SEQ ID NO: 700 - protein, 5 aa, Synthetic construct
SMNRR

SEQ ID NO: 701 - protein, 5 aa, Synthetic construct
SCMGV

SEQ ID NO: 702 - protein, 5 aa, Synthetic construct
CMGVM

SEQ ID NO: 703 - protein, 5 aa, Synthetic construct
MGVMN

SEQ ID NO: 704 - protein, 5 aa, Synthetic construct
GVMNR

SEQ ID NO: 705 - protein, 5 aa, Synthetic construct
VMNRR

SEQ ID NO: 706 - protein, 5 aa, Synthetic construct
RCPHR

SEQ ID NO: 707 - protein, 5 aa, Synthetic construct
CPHRE

SEQ ID NO: 708 - protein, 5 aa, Synthetic construct
PHRER

SEQ ID NO: 709 - protein, 5 aa, Synthetic construct
HRERC

SEQ ID NO: 710 - protein, 5 aa, Synthetic construct
RERCS

SEQ ID NO: 711 - protein, 5 aa, Synthetic construct
RCPHY

SEQ ID NO: 712 - protein, 5 aa, Synthetic construct
CPHYE

SEQ ID NO: 713 - protein, 5 aa, Synthetic construct
PHYER

SEQ ID NO: 714 - protein, 5 aa, Synthetic construct
HYERC

SEQ ID NO: 715 - protein, 5 aa, Synthetic construct
YERCS

SEQ ID NO: 716 - protein, 5 aa, Synthetic construct
APPQR

SEQ ID NO: 717 - protein, 5 aa, Synthetic construct
PPQRL

SEQ ID NO: 718 - protein, 5 aa, Synthetic construct
PQRLI

SEQ ID NO: 719 - protein, 5 aa, Synthetic construct
QRLIR

SEQ ID NO: 720 - protein, 5 aa, Synthetic construct
RLIRV

SEQ ID NO: 721 - protein, 5 aa, Synthetic construct
PQHLT

SEQ ID NO: 722 - protein, 5 aa, Synthetic construct
QHLTR

SEQ ID NO: 723 - protein, 5 aa, Synthetic construct
HLTRV

SEQ ID NO: 724 - protein, 5 aa, Synthetic construct
LTRVE

SEQ ID NO: 725 - protein, 5 aa, Synthetic construct
TRVEG

SEQ ID NO: 726 - protein, 5 aa, Synthetic construct
PPQHR

SEQ ID NO: 727 - protein, 5 aa, Synthetic construct
PQHRI

SEQ ID NO: 728 - protein, 5 aa, Synthetic construct
QHRIR

SEQ ID NO: 729 - protein, 5 aa, Synthetic construct
HRIRV

SEQ ID NO: 730 - protein, 5 aa, Synthetic construct
RIRVE

SEQ ID NO: 731 - protein, 5 aa, Synthetic construct
VDSTS

SEQ ID NO: 732 - protein, 5 aa, Synthetic construct
DSTSP

SEQ ID NO: 733 - protein, 5 aa, Synthetic construct
STSPP

SEQ ID NO: 734 - protein, 5 aa, Synthetic construct
TSPPG

SEQ ID NO: 735 - protein, 5 aa, Synthetic construct
SPPGT

SEQ ID NO: 736 - protein, 5 aa, Synthetic construct
GTRVH

SEQ ID NO: 737 - protein, 5 aa, Synthetic construct
TRVHA

SEQ ID NO: 738 - protein, 5 aa, Synthetic construct
RVHAM

SEQ ID NO: 739 - protein, 5 aa, Synthetic construct
VHAMA

SEQ ID NO: 740 - protein, 5 aa, Synthetic construct
HAMAI

SEQ ID NO: 741 - protein, 5 aa, Synthetic construct
GTRVL

SEQ ID NO: 742 - protein, 5 aa, Synthetic construct
TRVLA

SEQ ID NO: 743 - protein, 5 aa, Synthetic construct
RVLAM

SEQ ID NO: 744 - protein, 5 aa, Synthetic construct
VLAMA

SEQ ID NO: 745 - protein, 5 aa, Synthetic construct
LAMAI

SEQ ID NO: 746 - protein, 5 aa, Synthetic construct
EVVRH

SEQ ID NO: 747 - protein, 5 aa, Synthetic construct
VVRHC

SEQ ID NO: 748 - protein, 5 aa, Synthetic construct
VRHCP

SEQ ID NO: 749 - protein, 5 aa, Synthetic construct
RHCPH

SEQ ID NO: 750 - protein, 5 aa, Synthetic construct
HCPHH

SEQ ID NO: 751 - protein, 5 aa, Synthetic construct
GGMNQ

SEQ ID NO: 752 - protein, 5 aa, Synthetic construct
GMNQR

SEQ ID NO: 753 - protein, 5 aa, Synthetic construct
MNQRP

SEQ ID NO: 754 - protein, 5 aa, Synthetic construct
NQRPI

SEQ ID NO: 755 - protein, 5 aa, Synthetic construct
QRPIL

SEQ ID NO: 756 - protein, 5 aa, Synthetic construct
GGMNW

SEQ ID NO: 757 - protein, 5 aa, Synthetic construct
GMNWR

SEQ ID NO: 758 - protein, 5 aa, Synthetic construct
MNWRP

SEQ ID NO: 759 - protein, 5 aa, Synthetic construct
NWRPI

SEQ ID NO: 760 - protein, 5 aa, Synthetic construct
WRPIL

SEQ ID NO: 761 - protein, 5 aa, Synthetic construct
GMNRS

SEQ ID NO: 762 - protein, 5 aa, Synthetic construct
MNRSP

SEQ ID NO: 763 - protein, 5 aa, Synthetic construct
NRSPI

SEQ ID NO: 764 - protein, 5 aa, Synthetic construct
RSPIL

SEQ ID NO: 765 - protein, 5 aa, Synthetic construct
SPILT

SEQ ID NO: 766 - protein, 5 aa, Synthetic construct
GMNRS

SEQ ID NO: 767 - protein, 5 aa, Synthetic construct
MNRSP

SEQ ID NO: 768 - protein, 5 aa, Synthetic construct
NRSPI

SEQ ID NO: 769 - protein, 5 aa, Synthetic construct
RSPIL

SEQ ID NO: 770 - protein, 5 aa, Synthetic construct
SPILT

SEQ ID NO: 771 - protein, 5 aa, Synthetic construct
SFEVC

SEQ ID NO: 772 - protein, 5 aa, Synthetic construct
FEVCV

SEQ ID NO: 773 - protein, 5 aa, Synthetic construct
EVCVC

SEQ ID NO: 774 - protein, 5 aa, Synthetic construct
VCVCA

SEQ ID NO: 775 - protein, 5 aa, Synthetic construct
CVCAC

SEQ ID NO: 776 - protein, 5 aa, Synthetic construct
SFEVH

SEQ ID NO: 777 - protein, 5 aa, Synthetic construct
FEVHV

SEQ ID NO: 778 - protein, 5 aa, Synthetic construct
EVHVC

SEQ ID NO: 779 - protein, 5 aa, Synthetic construct
VHVCA

SEQ ID NO: 780 - protein, 5 aa, Synthetic construct
HVCAC

SEQ ID NO: 781 - protein, 5 aa, Synthetic construct
SFEVL

SEQ ID NO: 782 - protein, 5 aa, Synthetic construct
FEVLV

SEQ ID NO: 783 - protein, 5 aa, Synthetic construct
EVLVC

SEQ ID NO: 784 - protein, 5 aa, Synthetic construct
VLVCA

SEQ ID NO: 785 - protein, 5 aa, Synthetic construct
LVCAC

SEQ ID NO: 786 - protein, 5 aa, Synthetic construct
ACPGK

SEQ ID NO: 787 - protein, 5 aa, Synthetic construct
CPGKD

SEQ ID NO: 788 - protein, 5 aa, Synthetic construct
PGKDR

SEQ ID NO: 789 - protein, 5 aa, Synthetic construct
GKDRR

SEQ ID NO: 790 - protein, 5 aa, Synthetic construct
KDRRT

SEQ ID NO: 791 - protein, 5 aa, Synthetic construct
ACPGT

SEQ ID NO: 792 - protein, 5 aa, Synthetic construct
CPGTD

SEQ ID NO: 793 - protein, 5 aa, Synthetic construct
PGTDR

SEQ ID NO: 794 - protein, 5 aa, Synthetic construct
GTDRR

SEQ ID NO: 795 - protein, 5 aa, Synthetic construct
TDRRT

SEQ ID NO: 796 - protein, 5 aa, Synthetic construct
PGRDW

SEQ ID NO: 797 - protein, 5 aa, Synthetic construct
GRDWR

SEQ ID NO: 798 - protein, 5 aa, Synthetic construct
RDWRT

SEQ ID NO: 799 - protein, 5 aa, Synthetic construct
DWRTE

SEQ ID NO: 800 - protein, 5 aa, Synthetic construct
WRTEE

SEQ ID NO: 801 - protein, 5 aa, Synthetic construct
MCNSF

SEQ ID NO: 802 - protein, 5 aa, Synthetic construct
CNSFC

SEQ ID NO: 803 - protein, 5 aa, Synthetic construct
NSFCM

SEQ ID NO: 804 - protein, 5 aa, Synthetic construct
SFCMG

SEQ ID NO: 805 - protein, 5 aa, Synthetic construct
FCMGG

SEQ ID NO: 806 - protein, 5 aa, Synthetic construct
PGTRF

SEQ ID NO: 807 - protein, 5 aa, Synthetic construct
GTRFR

SEQ ID NO: 808 - protein, 5 aa, Synthetic construct
TRFRA

SEQ ID NO: 809 - protein, 5 aa, Synthetic construct
RFRAM

SEQ ID NO: 810 - protein, 5 aa, Synthetic construct
FRAMA

SEQ ID NO: 811 - protein, 5 aa, Synthetic construct
MTEVM

SEQ ID NO: 812 - protein, 5 aa, Synthetic construct
TEVMR

SEQ ID NO: 813 - protein, 5 aa, Synthetic construct
EVMRR

SEQ ID NO: 814 - protein, 5 aa, Synthetic construct
VMRRC

SEQ ID NO: 815 - protein, 5 aa, Synthetic construct
MRRCP

SEQ ID NO: 816 - protein, 5 aa, Synthetic construct
NSFEM

SEQ ID NO: 817 - protein, 5 aa, Synthetic construct
SFEMR

SEQ ID NO: 818 - protein, 5 aa, Synthetic construct
FEMRV

SEQ ID NO: 819 - protein, 5 aa, Synthetic construct
EMRVC

SEQ ID NO: 820 - protein, 5 aa, Synthetic construct
MRVCA

SEQ ID NO: 821 - protein, 5 aa, Synthetic construct
AMAIC

SEQ ID NO: 822 - protein, 5 aa, Synthetic construct
MAICK

SEQ ID NO: 823 - protein, 5 aa, Synthetic construct
AICKQ

SEQ ID NO: 824 - protein, 5 aa, Synthetic construct
ICKQS

SEQ ID NO: 825 - protein, 5 aa, Synthetic construct
CKQSQ

SEQ ID NO: 826 - protein, 5 aa, Synthetic construct
LRVEC

SEQ ID NO: 827 - protein, 5 aa, Synthetic construct
RVECL

SEQ ID NO: 828 - protein, 5 aa, Synthetic construct
VECLD

SEQ ID NO: 829 - protein, 5 aa, Synthetic construct
ECLDD

SEQ ID NO: 830 - protein, 5 aa, Synthetic construct
CLDDR

SEQ ID NO: 831 - protein, 5 aa, Synthetic construct
VVVPC

SEQ ID NO: 832 - protein, 5 aa, Synthetic construct
VVPCE

SEQ ID NO: 833 - protein, 5 aa, Synthetic construct
VPCEP

SEQ ID NO: 834 - protein, 5 aa, Synthetic construct
PCEPP

SEQ ID NO: 835 - protein, 5 aa, Synthetic construct
CEPPE

SEQ ID NO: 836 - protein, 5 aa, Synthetic construct
TTIHC

SEQ ID NO: 837 - protein, 5 aa, Synthetic construct
TIHCN

SEQ ID NO: 838 - protein, 5 aa, Synthetic construct
IHCNY

SEQ ID NO: 839 - protein, 5 aa, Synthetic construct
HCNYM

SEQ ID NO: 840 - protein, 5 aa, Synthetic construct
CNYMC

SEQ ID NO: 841 - protein, 15 aa, Synthetic construct
VKEGWLHKRGKYIKT

SEQ ID NO: 842 - protein, 15 aa, Synthetic construct
KEGWLHKRGKYIKTW

SEQ ID NO: 843 - protein, 15 aa, Synthetic construct
GWLHKRGKYIKTWRP

SEQ ID NO: 844 - protein, 15 aa, Synthetic construct
LHKRGKYIKTWRPRY

SEQ ID NO: 845 - protein, 15 aa, Synthetic construct
HKRGKYIKTWRPRYF

SEQ ID NO: 846 - protein, 15 aa, Synthetic construct
GSRGKYSSGFCNIAV

SEQ ID NO: 847 - protein, 15 aa, Synthetic construct
SRGKYSSGFCNIAVK

SEQ ID NO: 848 - protein, 15 aa, Synthetic construct
GKYSSGFCNIAVKEN

SEQ ID NO: 849 - protein, 15 aa, Synthetic construct
YSSGFCNIAVKENLI

SEQ ID NO: 850 - protein, 15 aa, Synthetic construct
SSGFCNIAVKENLIE

SEQ ID NO: 851 - protein, 15 aa, Synthetic construct
MPPEARRLIVSKNAG

SEQ ID NO: 852 - protein, 15 aa, Synthetic construct
PPEARRLIVSKNAGE

SEQ ID NO: 853 - protein, 15 aa, Synthetic construct
EARRLIVSKNAGETL

SEQ ID NO: 854 - protein, 15 aa, Synthetic construct
RRLIVSKNAGETLLQ

SEQ ID NO: 855 - protein, 15 aa, Synthetic construct
RLIVSKNAGETLLQR

SEQ ID NO: 856 - protein, 15 aa, Synthetic construct
VKIGDFGLATEKSRW

SEQ ID NO: 857 - protein, 15 aa, Synthetic construct
KIGDFGLATEKSRWS

SEQ ID NO: 858 - protein, 15 aa, Synthetic construct
GDFGLATEKSRWSGS

SEQ ID NO: 859 - protein, 15 aa, Synthetic construct
FGLATEKSRWSGSHQ

SEQ ID NO: 860 - protein, 15 aa, Synthetic construct
GLATEKSRWSGSHQF

SEQ ID NO: 861 - protein, 15 aa, Synthetic construct
VKIGDFGLATMKSRW

SEQ ID NO: 862 - protein, 15 aa, Synthetic construct
KIGDFGLATMKSRWS

SEQ ID NO: 863 - protein, 15 aa, Synthetic construct
GDFGLATMKSRWSGS

SEQ ID NO: 864 - protein, 15 aa, Synthetic construct
FGLATMKSRWSGSHQ

SEQ ID NO: 865 - protein, 15 aa, Synthetic construct
GLATMKSRWSGSHQF

SEQ ID NO: 866 - protein, 15 aa, Synthetic construct
ADPATLTRPVYDAAR

SEQ ID NO: 867 - protein, 15 aa, Synthetic construct
DPATLTRPVYDAARE

SEQ ID NO: 868 - protein, 15 aa, Synthetic construct
ATLTRPVYDAAREGF

SEQ ID NO: 869 - protein, 15 aa, Synthetic construct
LTRPVYDAAREGFLD

SEQ ID NO: 870 - protein, 15 aa, Synthetic construct
TRPVYDAAREGFLDT

SEQ ID NO: 871 - protein, 15 aa, Synthetic construct
SHWQQQSYLDCGIHS

SEQ ID NO: 872 - protein, 15 aa, Synthetic construct
HWQQQSYLDCGIHSG

SEQ ID NO: 873 - protein, 15 aa, Synthetic construct
QQQSYLDCGIHSGAT

SEQ ID NO: 874 - protein, 15 aa, Synthetic construct
QSYLDCGIHSGATTT

SEQ ID NO: 875 - protein, 15 aa, Synthetic construct
SYLDCGIHSGATTTA

SEQ ID NO: 876 - protein, 15 aa, Synthetic construct
QQSYLDSGIHCGATT

SEQ ID NO: 877 - protein, 15 aa, Synthetic construct
QSYLDSGIHCGATTT

SEQ ID NO: 878 - protein, 15 aa, Synthetic construct
YLDSGIHCGATTTAP

SEQ ID NO: 879 - protein, 15 aa, Synthetic construct
DSGIHCGATTTAPSL

SEQ ID NO: 880 - protein, 15 aa, Synthetic construct
SGIHCGATTTAPSLS

SEQ ID NO: 881 - protein, 15 aa, Synthetic construct
QQSYLDSGIHFGATT

SEQ ID NO: 882 - protein, 15 aa, Synthetic construct
QSYLDSGIHFGATTT

SEQ ID NO: 883 - protein, 15 aa, Synthetic construct
YLDSGIHFGATTTAP

SEQ ID NO: 884 - protein, 15 aa, Synthetic construct
DSGIHFGATTTAPSL

SEQ ID NO: 885 - protein, 15 aa, Synthetic construct
SGIHFGATTTAPSLS

SEQ ID NO: 886 - protein, 15 aa, Synthetic construct
IHSGATTTAPPLSGK

SEQ ID NO: 887 - protein, 15 aa, Synthetic construct
HSGATTTAPPLSGKG

SEQ ID NO: 888 - protein, 15 aa, Synthetic construct
GATTTAPPLSGKGNP

SEQ ID NO: 889 - protein, 15 aa, Synthetic construct
TTTAPPLSGKGNPEE

SEQ ID NO: 890 - protein, 15 aa, Synthetic construct
TTAPPLSGKGNPEEE

SEQ ID NO: 891 - protein, 15 aa, Synthetic construct
LDSGIHSGATATAPS

SEQ ID NO: 892 - protein, 15 aa, Synthetic construct
DSGIHSGATATAPSL

SEQ ID NO: 893 - protein, 15 aa, Synthetic construct
GIHSGATATAPSLSG

SEQ ID NO: 894 - protein, 15 aa, Synthetic construct
HSGATATAPSLSGKG

SEQ ID NO: 895 - protein, 15 aa, Synthetic construct
SGATATAPSLSGKGN

SEQ ID NO: 896 - protein, 15 aa, Synthetic construct
VNPEGKYSFGVTCVK

SEQ ID NO: 897 - protein, 15 aa, Synthetic construct
NPEGKYSFGVTCVKK

SEQ ID NO: 898 - protein, 15 aa, Synthetic construct
EGKYSFGVTCVKKCP

SEQ ID NO: 899 - protein, 15 aa, Synthetic construct
KYSFGVTCVKKCPRN

SEQ ID NO: 900 - protein, 15 aa, Synthetic construct
YSFGVTCVKKCPRNY

SEQ ID NO: 901 - protein, 15 aa, Synthetic construct
GPHCVKTCPAVVMGE

SEQ ID NO: 902 - protein, 15 aa, Synthetic construct
PHCVKTCPAVVMGEN

SEQ ID NO: 903 - protein, 15 aa, Synthetic construct
CVKTCPAVVMGENNT

SEQ ID NO: 904 - protein, 15 aa, Synthetic construct
KTCPAVVMGENNTLV

SEQ ID NO: 905 - protein, 15 aa, Synthetic construct
TCPAVVMGENNTLVW

SEQ ID NO: 906 - protein, 15 aa, Synthetic construct
PQHVKITDFGRAKLL

SEQ ID NO: 907 - protein, 15 aa, Synthetic construct
QHVKITDFGRAKLLG

SEQ ID NO: 908 - protein, 15 aa, Synthetic construct
VKITDFGRAKLLGAE

SEQ ID NO: 909 - protein, 15 aa, Synthetic construct
ITDFGRAKLLGAEEK

SEQ ID NO: 910 - protein, 15 aa, Synthetic construct
TDFGRAKLLGAEEKE

SEQ ID NO: 911 - protein, 15 aa, Synthetic construct
HTLYGHTSTVCCMHL

SEQ ID NO: 912 - protein, 15 aa, Synthetic construct
TLYGHTSTVCCMHLH

SEQ ID NO: 913 - protein, 15 aa, Synthetic construct
YGHTSTVCCMHLHEK

SEQ ID NO: 914 - protein, 15 aa, Synthetic construct
HTSTVCCMHLHEKRV

SEQ ID NO: 915 - protein, 15 aa, Synthetic construct
TSTVCCMHLHEKRVV

SEQ ID NO: 916 - protein, 15 aa, Synthetic construct
HTLYGHTSTVGCMHL

SEQ ID NO: 917 - protein, 15 aa, Synthetic construct
TLYGHTSTVGCMHLH

SEQ ID NO: 918 - protein, 15 aa, Synthetic construct
YGHTSTVGCMHLHEK

SEQ ID NO: 919 - protein, 15 aa, Synthetic construct
HTSTVGCMHLHEKRV

SEQ ID NO: 920 - protein, 15 aa, Synthetic construct
TSTVGCMHLHEKRVV

SEQ ID NO: 921 - protein, 15 aa, Synthetic construct
LHEKRVVSGSQDATL

SEQ ID NO: 922 - protein, 15 aa, Synthetic construct
HEKRVVSGSQDATLR

SEQ ID NO: 923 - protein, 15 aa, Synthetic construct
KRVVSGSQDATLRVW

SEQ ID NO: 924 - protein, 15 aa, Synthetic construct
VVSGSQDATLRVWDI

SEQ ID NO: 925 - protein, 15 aa, Synthetic construct
VSGSQDATLRVWDIE

SEQ ID NO: 926 - protein, 15 aa, Synthetic construct
HVLMGHVAAVCCVQY

SEQ ID NO: 927 - protein, 15 aa, Synthetic construct
VLMGHVAAVCCVQYD

SEQ ID NO: 928 - protein, 15 aa, Synthetic construct
MGHVAAVCCVQYDGR

SEQ ID NO: 929 - protein, 15 aa, Synthetic construct
HVAAVCCVQYDGRRV

SEQ ID NO: 930 - protein, 15 aa, Synthetic construct
VAAVCCVQYDGRRVV

SEQ ID NO: 931 - protein, 15 aa, Synthetic construct
HVLMGHVAAVGCVQY

SEQ ID NO: 932 - protein, 15 aa, Synthetic construct
VLMGHVAAVGCVQYD

SEQ ID NO: 933 - protein, 15 aa, Synthetic construct
MGHVAAVGCVQYDGR

SEQ ID NO: 934 - protein, 15 aa, Synthetic construct
HVAAVGCVQYDGRRV

SEQ ID NO: 935 - protein, 15 aa, Synthetic construct
VAAVGCVQYDGRRVV

SEQ ID NO: 936 - protein, 15 aa, Synthetic construct
HTYHLDVVERWPHRP

SEQ ID NO: 937 - protein, 15 aa, Synthetic construct
TYHLDVVERWPHRPI

SEQ ID NO: 938 - protein, 15 aa, Synthetic construct
HLDVVERWPHRPILQ

SEQ ID NO: 939 - protein, 15 aa, Synthetic construct
DVVERWPHRPILQAG

SEQ ID NO: 940 - protein, 15 aa, Synthetic construct
VVERWPHRPILQAGL

SEQ ID NO: 941 - protein, 15 aa, Synthetic construct
QTYTLDVLERCPHRP

SEQ ID NO: 942 - protein, 15 aa, Synthetic construct
TYTLDVLERCPHRPI

SEQ ID NO: 943 - protein, 15 aa, Synthetic construct
TLDVLERCPHRPILQ

SEQ ID NO: 944 - protein, 15 aa, Synthetic construct
DVLERCPHRPILQAG

SEQ ID NO: 945 - protein, 15 aa, Synthetic construct
VLERCPHRPILQAGL

SEQ ID NO: 946 - protein, 15 aa, Synthetic construct
IIFRMVDVGGLRSER

SEQ ID NO: 947 - protein, 15 aa, Synthetic construct
IFRMVDVGGLRSERR

SEQ ID NO: 948 - protein, 15 aa, Synthetic construct
RMVDVGGLRSERRKW

SEQ ID NO: 949 - protein, 15 aa, Synthetic construct
VDVGGLRSERRKWIH

SEQ ID NO: 950 - protein, 15 aa, Synthetic construct
DVGGLRSERRKWIHC

SEQ ID NO: 951 - protein, 15 aa, Synthetic construct
VIFRMVDVGGLRSER

SEQ ID NO: 952 - protein, 15 aa, Synthetic construct
IFRMVDVGGLRSERR

SEQ ID NO: 953 - protein, 15 aa, Synthetic construct
RMVDVGGLRSERRKW

SEQ ID NO: 954 - protein, 15 aa, Synthetic construct
VDVGGLRSERRKWIH

SEQ ID NO: 955 - protein, 15 aa, Synthetic construct
DVGGLRSERRKWIHC

SEQ ID NO: 956 - protein, 15 aa, Synthetic construct
VIFRMVDVGGPRSER

SEQ ID NO: 957 - protein, 15 aa, Synthetic construct
IFRMVDVGGPRSERR

SEQ ID NO: 958 - protein, 15 aa, Synthetic construct
RMVDVGGPRSERRKW

SEQ ID NO: 959 - protein, 15 aa, Synthetic construct
VDVGGPRSERRKWIH

SEQ ID NO: 960 - protein, 15 aa, Synthetic construct
DVGGPRSERRKWIHC

SEQ ID NO: 961 - protein, 15 aa, Synthetic construct
VPSDQDLLRCCVLTS

SEQ ID NO: 962 - protein, 15 aa, Synthetic construct
PSDQDLLRCCVLTSG

SEQ ID NO: 963 - protein, 15 aa, Synthetic construct
DQDLLRCCVLTSGIF

SEQ ID NO: 964 - protein, 15 aa, Synthetic construct
DLLRCCVLTSGIFET

SEQ ID NO: 965 - protein, 15 aa, Synthetic construct
LLRCCVLTSGIFETK

SEQ ID NO: 966 - protein, 15 aa, Synthetic construct
CLLDILDTAGREEYS

SEQ ID NO: 967 - protein, 15 aa, Synthetic construct
LLDILDTAGREEYSA

SEQ ID NO: 968 - protein, 15 aa, Synthetic construct
DILDTAGREEYSAMR

SEQ ID NO: 969 - protein, 15 aa, Synthetic construct
LDTAGREEYSAMRDQ

SEQ ID NO: 970 - protein, 15 aa, Synthetic construct
DTAGREEYSAMRDQY

SEQ ID NO: 971 - protein, 15 aa, Synthetic construct
SYGIPFIETSTKTRQ

SEQ ID NO: 972 - protein, 15 aa, Synthetic construct
YGIPFIETSTKTRQR

SEQ ID NO: 973 - protein, 15 aa, Synthetic construct
IPFIETSTKTRQRVE

SEQ ID NO: 974 - protein, 15 aa, Synthetic construct
FIETSTKTRQRVEDA

SEQ ID NO: 975 - protein, 15 aa, Synthetic construct
IETSTKTRQRVEDAF

SEQ ID NO: 976 - protein, 15 aa, Synthetic construct
TEYKLVVVGAAGVGK

SEQ ID NO: 977 - protein, 15 aa, Synthetic construct
EYKLVVVGAAGVGKS

SEQ ID NO: 978 - protein, 15 aa, Synthetic construct
KLVVVGAAGVGKSAL

SEQ ID NO: 979 - protein, 15 aa, Synthetic construct
VVVGAAGVGKSALTI

SEQ ID NO: 980 - protein, 15 aa, Synthetic construct
VVGAAGVGKSALTIQ

SEQ ID NO: 981 - protein, 15 aa, Synthetic construct
TEYKLVVVGACGVGK

SEQ ID NO: 982 - protein, 15 aa, Synthetic construct
EYKLVVVGACGVGKS

SEQ ID NO: 983 - protein, 15 aa, Synthetic construct
KLVVVGACGVGKSAL

SEQ ID NO: 984 - protein, 15 aa, Synthetic construct
VVVGACGVGKSALTI

SEQ ID NO: 985 - protein, 15 aa, Synthetic construct
VVGACGVGKSALTIQ

SEQ ID NO: 986 - protein, 15 aa, Synthetic construct
TEYKLVVVGADGVGK

SEQ ID NO: 987 - protein, 15 aa, Synthetic construct
EYKLVVVGADGVGKS

SEQ ID NO: 988 - protein, 15 aa, Synthetic construct
KLVVVGADGVGKSAL

SEQ ID NO: 989 - protein, 15 aa, Synthetic construct
VVVGADGVGKSALTI

SEQ ID NO: 990 - protein, 15 aa, Synthetic construct
VVGADGVGKSALTIQ

SEQ ID NO: 991 - protein, 15 aa, Synthetic construct
TEYKLVVVGARGVGK

SEQ ID NO: 992 - protein, 15 aa, Synthetic construct
EYKLVVVGARGVGKS

SEQ ID NO: 993 - protein, 15 aa, Synthetic construct
KLVVVGARGVGKSAL

SEQ ID NO: 994 - protein, 15 aa, Synthetic construct
VVVGARGVGKSALTI

SEQ ID NO: 995 - protein, 15 aa, Synthetic construct
VVGARGVGKSALTIQ

SEQ ID NO: 996 - protein, 15 aa, Synthetic construct
TEYKLVVVGASGVGK

SEQ ID NO: 997 - protein, 15 aa, Synthetic construct
EYKLVVVGASGVGKS

SEQ ID NO: 998 - protein, 15 aa, Synthetic construct
KLVVVGASGVGKSAL

SEQ ID NO: 999 - protein, 15 aa, Synthetic construct
VVVGASGVGKSALTI

SEQ ID NO: 1000 - protein, 15 aa, Synthetic construct
VVGASGVGKSALTIQ

SEQ ID NO: 1001 - protein, 15 aa, Synthetic construct
TEYKLVVVGAVGVGK

SEQ ID NO: 1002 - protein, 15 aa, Synthetic construct
EYKLVVVGAVGVGKS

SEQ ID NO: 1003 - protein, 15 aa, Synthetic construct
KLVVVGAVGVGKSAL

SEQ ID NO: 1004 - protein, 15 aa, Synthetic construct
VVVGAVGVGKSALTI

SEQ ID NO: 1005 - protein, 15 aa, Synthetic construct
VVGAVGVGKSALTIQ

SEQ ID NO: 1006 - protein, 15 aa, Synthetic construct
EYKLVVVGAGCVGKS

SEQ ID NO: 1007 - protein, 15 aa, Synthetic construct
YKLVVVGAGCVGKSA

SEQ ID NO: 1008 - protein, 15 aa, Synthetic construct
LVVVGAGCVGKSALT

SEQ ID NO: 1009 - protein, 15 aa, Synthetic construct
VVGAGCVGKSALTIQ

SEQ ID NO: 1010 - protein, 15 aa, Synthetic construct
VGAGCVGKSALTIQL

SEQ ID NO: 1011 - protein, 15 aa, Synthetic construct
EYKLVVVGAGDVGKS

SEQ ID NO: 1012 - protein, 15 aa, Synthetic construct
YKLVVVGAGDVGKSA

SEQ ID NO: 1013 - protein, 15 aa, Synthetic construct
LVVVGAGDVGKSALT

SEQ ID NO: 1014 - protein, 15 aa, Synthetic construct
VVGAGDVGKSALTIQ

SEQ ID NO: 1015 - protein, 15 aa, Synthetic construct
VGAGDVGKSALTIQL

SEQ ID NO: 1016 - protein, 15 aa, Synthetic construct
CLLDILDTAGHEEYS

SEQ ID NO: 1017 - protein, 15 aa, Synthetic construct
LLDILDTAGHEEYSA

SEQ ID NO: 1018 - protein, 15 aa, Synthetic construct
DILDTAGHEEYSAMR

SEQ ID NO: 1019 - protein, 15 aa, Synthetic construct
LDTAGHEEYSAMRDQ

SEQ ID NO: 1020 - protein, 15 aa, Synthetic construct
DTAGHEEYSAMRDQY

SEQ ID NO: 1021 - protein, 15 aa, Synthetic construct
CLLDILDTAGHEEYS

SEQ ID NO: 1022 - protein, 15 aa, Synthetic construct
LLDILDTAGHEEYSA

SEQ ID NO: 1023 - protein, 15 aa, Synthetic construct
DILDTAGHEEYSAMR

SEQ ID NO: 1024 - protein, 15 aa, Synthetic construct
LDTAGHEEYSAMRDQ

SEQ ID NO: 1025 - protein, 15 aa, Synthetic construct
DTAGHEEYSAMRDQY

SEQ ID NO: 1026 - protein, 15 aa, Synthetic construct
CLLDILDTAGLEEYS

SEQ ID NO: 1027 - protein, 15 aa, Synthetic construct
LLDILDTAGLEEYSA

SEQ ID NO: 1028 - protein, 15 aa, Synthetic construct
DILDTAGLEEYSAMR

SEQ ID NO: 1029 - protein, 15 aa, Synthetic construct
LDTAGLEEYSAMRDQ

SEQ ID NO: 1030 - protein, 15 aa, Synthetic construct
DTAGLEEYSAMRDQY

SEQ ID NO: 1031 - protein, 15 aa, Synthetic construct
TEYKLVVVGADGVGK

SEQ ID NO: 1032 - protein, 15 aa, Synthetic construct
EYKLVVVGADGVGKS

SEQ ID NO: 1033 - protein, 15 aa, Synthetic construct
KLVVVGADGVGKSAL

SEQ ID NO: 1034 - protein, 15 aa, Synthetic construct
VVVGADGVGKSALTI

SEQ ID NO: 1035 - protein, 15 aa, Synthetic construct
VVGADGVGKSALTIQ

SEQ ID NO: 1036 - protein, 15 aa, Synthetic construct
EYKLVVVGAGDVGKS

SEQ ID NO: 1037 - protein, 15 aa, Synthetic construct
YKLVVVGAGDVGKSA

SEQ ID NO: 1038 - protein, 15 aa, Synthetic construct
LVVVGAGDVGKSALT

SEQ ID NO: 1039 - protein, 15 aa, Synthetic construct
VVGAGDVGKSALTIQ

SEQ ID NO: 1040 - protein, 15 aa, Synthetic construct
VGAGDVGKSALTIQL

SEQ ID NO: 1041 - protein, 15 aa, Synthetic construct
EYKLVVVGAGRVGKS

SEQ ID NO: 1042 - protein, 15 aa, Synthetic construct
YKLVVVGAGRVGKSA

SEQ ID NO: 1043 - protein, 15 aa, Synthetic construct
LVVVGAGRVGKSALT

SEQ ID NO: 1044 - protein, 15 aa, Synthetic construct
VVGAGRVGKSALTIQ

SEQ ID NO: 1045 - protein, 15 aa, Synthetic construct
VGAGRVGKSALTIQL

SEQ ID NO: 1046 - protein, 15 aa, Synthetic construct
CLLDILDTAGKEEYS

SEQ ID NO: 1047 - protein, 15 aa, Synthetic construct
LLDILDTAGKEEYSA

SEQ ID NO: 1048 - protein, 15 aa, Synthetic construct
DILDTAGKEEYSAMR

SEQ ID NO: 1049 - protein, 15 aa, Synthetic construct
LDTAGKEEYSAMRDQ

SEQ ID NO: 1050 - protein, 15 aa, Synthetic construct
DTAGKEEYSAMRDQY

SEQ ID NO: 1051 - protein, 15 aa, Synthetic construct
CLLDILDTAGLEEYS

SEQ ID NO: 1052 - protein, 15 aa, Synthetic construct
LLDILDTAGLEEYSA

SEQ ID NO: 1053 - protein, 15 aa, Synthetic construct
DILDTAGLEEYSAMR

SEQ ID NO: 1054 - protein, 15 aa, Synthetic construct
LDTAGLEEYSAMRDQ

SEQ ID NO: 1055 - protein, 15 aa, Synthetic construct
DTAGLEEYSAMRDQY

SEQ ID NO: 1056 - protein, 15 aa, Synthetic construct
YFRNLCSDDTRMVRR

SEQ ID NO: 1057 - protein, 15 aa, Synthetic construct
FRNLCSDDTRMVRRA

SEQ ID NO: 1058 - protein, 15 aa, Synthetic construct
NLCSDDTRMVRRAAA

SEQ ID NO: 1059 - protein, 15 aa, Synthetic construct
CSDDTRMVRRAAASK

SEQ ID NO: 1060 - protein, 15 aa, Synthetic construct
SDDTRMVRRAAASKL

SEQ ID NO: 1061 - protein, 15 aa, Synthetic construct
LCSDDTPMVRWAAAS

SEQ ID NO: 1062 - protein, 15 aa, Synthetic construct
CSDDTPMVRWAAASK

SEQ ID NO: 1063 - protein, 15 aa, Synthetic construct
DDTPMVRWAAASKLG

SEQ ID NO: 1064 - protein, 15 aa, Synthetic construct
TPMVRWAAASKLGEF

SEQ ID NO: 1065 - protein, 15 aa, Synthetic construct
PMVRWAAASKLGEFA

SEQ ID NO: 1066 - protein, 15 aa, Synthetic construct
AAIHCKAGKGGTGVM

SEQ ID NO: 1067 - protein, 15 aa, Synthetic construct
AIHCKAGKGGTGVMI

SEQ ID NO: 1068 - protein, 15 aa, Synthetic construct
HCKAGKGGTGVMICA

SEQ ID NO: 1069 - protein, 15 aa, Synthetic construct
KAGKGGTGVMICAYL

SEQ ID NO: 1070 - protein, 15 aa, Synthetic construct
AGKGGTGVMICAYLL

SEQ ID NO: 1071 - protein, 15 aa, Synthetic construct
AAIHCKAGKGQTGVM

SEQ ID NO: 1072 - protein, 15 aa, Synthetic construct
AIHCKAGKGQTGVMI

SEQ ID NO: 1073 - protein, 15 aa, Synthetic construct
HCKAGKGQTGVMICA

SEQ ID NO: 1074 - protein, 15 aa, Synthetic construct
KAGKGQTGVMICAYL

SEQ ID NO: 1075 - protein, 15 aa, Synthetic construct
AGKGQTGVMICAYLL

SEQ ID NO: 1076 - protein, 15 aa, Synthetic construct
DGYVDPSGGDHFCLG

SEQ ID NO: 1077 - protein, 15 aa, Synthetic construct
GYVDPSGGDHFCLGQ

SEQ ID NO: 1078 - protein, 15 aa, Synthetic construct
VDPSGGDHFCLGQLS

SEQ ID NO: 1079 - protein, 15 aa, Synthetic construct
PSGGDHFCLGQLSNV

SEQ ID NO: 1080 - protein, 15 aa, Synthetic construct
SGGDHFCLGQLSNVH

SEQ ID NO: 1081 - protein, 15 aa, Synthetic construct
SQHMTEVVRRFPHHE

SEQ ID NO: 1082 - protein, 15 aa, Synthetic construct
QHMTEVVRRFPHHER

SEQ ID NO: 1083 - protein, 15 aa, Synthetic construct
MTEVVRRFPHHERCS

SEQ ID NO: 1084 - protein, 15 aa, Synthetic construct
EVVRRFPHHERCSDS

SEQ ID NO: 1085 - protein, 15 aa, Synthetic construct
VVRRFPHHERCSDSD

SEQ ID NO: 1086 - protein, 15 aa, Synthetic construct
SQHMTEVVRRYPHHE

SEQ ID NO: 1087 - protein, 15 aa, Synthetic construct
QHMTEVVRRYPHHER

SEQ ID NO: 1088 - protein, 15 aa, Synthetic construct
MTEVVRRYPHHERCS

SEQ ID NO: 1089 - protein, 15 aa, Synthetic construct
EVVRRYPHHERCSDS

SEQ ID NO: 1090 - protein, 15 aa, Synthetic construct
VVRRYPHHERCSDSD

SEQ ID NO: 1091 - protein, 15 aa, Synthetic construct
DCTTIHYNYMYNSSC

SEQ ID NO: 1092 - protein, 15 aa, Synthetic construct
CTTIHYNYMYNSSCM

SEQ ID NO: 1093 - protein, 15 aa, Synthetic construct
TIHYNYMYNSSCMGG

SEQ ID NO: 1094 - protein, 15 aa, Synthetic construct
HYNYMYNSSCMGGMN

SEQ ID NO: 1095 - protein, 15 aa, Synthetic construct
YNYMYNSSCMGGMNR

SEQ ID NO: 1096 - protein, 15 aa, Synthetic construct
LGRNSFEVRVYACPG

SEQ ID NO: 1097 - protein, 15 aa, Synthetic construct
GRNSFEVRVYACPGR

SEQ ID NO: 1098 - protein, 15 aa, Synthetic construct
NSFEVRVYACPGRDR

SEQ ID NO: 1099 - protein, 15 aa, Synthetic construct
FEVRVYACPGRDRRT

SEQ ID NO: 1100 - protein, 15 aa, Synthetic construct
EVRVYACPGRDRRTE

SEQ ID NO: 1101 - protein, 15 aa, Synthetic construct
CACPGRDRRTKEENL

SEQ ID NO: 1102 - protein, 15 aa, Synthetic construct
ACPGRDRRTKEENLR

SEQ ID NO: 1103 - protein, 15 aa, Synthetic construct
PGRDRRTKEENLRKK

SEQ ID NO: 1104 - protein, 15 aa, Synthetic construct
RDRRTKEENLRKKGE

SEQ ID NO: 1105 - protein, 15 aa, Synthetic construct
DRRTKEENLRKKGEP

SEQ ID NO: 1106 - protein, 15 aa, Synthetic construct
ACPGRDRRTEKENLR

SEQ ID NO: 1107 - protein, 15 aa, Synthetic construct
CPGRDRRTEKENLRK

SEQ ID NO: 1108 - protein, 15 aa, Synthetic construct
GRDRRTEKENLRKKG

SEQ ID NO: 1109 - protein, 15 aa, Synthetic construct
DRRTEKENLRKKGEP

SEQ ID NO: 1110 - protein, 15 aa, Synthetic construct
RRTEKENLRKKGEPH

SEQ ID NO: 1111 - protein, 15 aa, Synthetic construct
NYMCNSSCMGDMNRR

SEQ ID NO: 1112 - protein, 15 aa, Synthetic construct
YMCNSSCMGDMNRRP

SEQ ID NO: 1113 - protein, 15 aa, Synthetic construct
CNSSCMGDMNRRPIL

SEQ ID NO: 1114 - protein, 15 aa, Synthetic construct
SSCMGDMNRRPILTI

SEQ ID NO: 1115 - protein, 15 aa, Synthetic construct
SCMGDMNRRPILTII

SEQ ID NO: 1116 - protein, 15 aa, Synthetic construct
NYMCNSSCMGSMNRR

SEQ ID NO: 1117 - protein, 15 aa, Synthetic construct
YMCNSSCMGSMNRRP

SEQ ID NO: 1118 - protein, 15 aa, Synthetic construct
CNSSCMGSMNRRPIL

SEQ ID NO: 1119 - protein, 15 aa, Synthetic construct
SSCMGSMNRRPILTI

SEQ ID NO: 1120 - protein, 15 aa, Synthetic construct
SCMGSMNRRPILTII

SEQ ID NO: 1121 - protein, 15 aa, Synthetic construct
NYMCNSSCMGVMNRR

SEQ ID NO: 1122 - protein, 15 aa, Synthetic construct
YMCNSSCMGVMNRRP

SEQ ID NO: 1123 - protein, 15 aa, Synthetic construct
CNSSCMGVMNRRPIL

SEQ ID NO: 1124 - protein, 15 aa, Synthetic construct
SSCMGVMNRRPILTI

SEQ ID NO: 1125 - protein, 15 aa, Synthetic construct
SCMGVMNRRPILTII

SEQ ID NO: 1126 - protein, 15 aa, Synthetic construct
MTEVVRRCPHRERCS

SEQ ID NO: 1127 - protein, 15 aa, Synthetic construct
TEVVRRCPHRERCSD

SEQ ID NO: 1128 - protein, 15 aa, Synthetic construct
VVRRCPHRERCSDSD

SEQ ID NO: 1129 - protein, 15 aa, Synthetic construct
RRCPHRERCSDSDGL

SEQ ID NO: 1130 - protein, 15 aa, Synthetic construct
RCPHRERCSDSDGLA

SEQ ID NO: 1131 - protein, 15 aa, Synthetic construct
MTEVVRRCPHYERCS

SEQ ID NO: 1132 - protein, 15 aa, Synthetic construct
TEVVRRCPHYERCSD

SEQ ID NO: 1133 - protein, 15 aa, Synthetic construct
VVRRCPHYERCSDSD

SEQ ID NO: 1134 - protein, 15 aa, Synthetic construct
RRCPHYERCSDSDGL

SEQ ID NO: 1135 - protein, 15 aa, Synthetic construct
RCPHYERCSDSDGLA

SEQ ID NO: 1136 - protein, 15 aa, Synthetic construct
SDSDGLAPPQRLIRV

SEQ ID NO: 1137 - protein, 15 aa, Synthetic construct
DSDGLAPPQRLIRVE

SEQ ID NO: 1138 - protein, 15 aa, Synthetic construct
DGLAPPQRLIRVEGN

SEQ ID NO: 1139 - protein, 15 aa, Synthetic construct
LAPPQRLIRVEGNLR

SEQ ID NO: 1140 - protein, 15 aa, Synthetic construct
APPQRLIRVEGNLRV

SEQ ID NO: 1141 - protein, 15 aa, Synthetic construct
SDGLAPPQHLTRVEG

SEQ ID NO: 1142 - protein, 15 aa, Synthetic construct
DGLAPPQHLTRVEGN

SEQ ID NO: 1143 - protein, 15 aa, Synthetic construct
LAPPQHLTRVEGNLR

SEQ ID NO: 1144 - protein, 15 aa, Synthetic construct
PPQHLTRVEGNLRVE

SEQ ID NO: 1145 - protein, 15 aa, Synthetic construct
PQHLTRVEGNLRVEY

SEQ ID NO: 1146 - protein, 15 aa, Synthetic construct
DSDGLAPPQHRIRVE

SEQ ID NO: 1147 - protein, 15 aa, Synthetic construct
SDGLAPPQHRIRVEG

SEQ ID NO: 1148 - protein, 15 aa, Synthetic construct
GLAPPQHRIRVEGNL

SEQ ID NO: 1149 - protein, 15 aa, Synthetic construct
APPQHRIRVEGNLRV

SEQ ID NO: 1150 - protein, 15 aa, Synthetic construct
PPQHRIRVEGNLRVE

SEQ ID NO: 1151 - protein, 15 aa, Synthetic construct
CPVQLWVDSTSPPGT

SEQ ID NO: 1152 - protein, 15 aa, Synthetic construct
PVQLWVDSTSPPGTR

SEQ ID NO: 1153 - protein, 15 aa, Synthetic construct
QLWVDSTSPPGTRVR

SEQ ID NO: 1154 - protein, 15 aa, Synthetic construct
WVDSTSPPGTRVRAM

SEQ ID NO: 1155 - protein, 15 aa, Synthetic construct
VDSTSPPGTRVRAMA

SEQ ID NO: 1156 - protein, 15 aa, Synthetic construct
DSTPPPGTRVHAMAI

SEQ ID NO: 1157 - protein, 15 aa, Synthetic construct
STPPPGTRVHAMAIY

SEQ ID NO: 1158 - protein, 15 aa, Synthetic construct
PPPGTRVHAMAIYKQ

SEQ ID NO: 1159 - protein, 15 aa, Synthetic construct
PGTRVHAMAIYKQSQ

SEQ ID NO: 1160 - protein, 15 aa, Synthetic construct
GTRVHAMAIYKQSQH

SEQ ID NO: 1161 - protein, 15 aa, Synthetic construct
DSTPPPGTRVLAMAI

SEQ ID NO: 1162 - protein, 15 aa, Synthetic construct
STPPPGTRVLAMAIY

SEQ ID NO: 1163 - protein, 15 aa, Synthetic construct
PPPGTRVLAMAIYKQ

SEQ ID NO: 1164 - protein, 15 aa, Synthetic construct
PGTRVLAMAIYKQSQ

SEQ ID NO: 1165 - protein, 15 aa, Synthetic construct
GTRVLAMAIYKQSQH

SEQ ID NO: 1166 - protein, 15 aa, Synthetic construct
QSQHMTEVVRHCPHH

SEQ ID NO: 1167 - protein, 15 aa, Synthetic construct
SQHMTEVVRHCPHHE

SEQ ID NO: 1168 - protein, 15 aa, Synthetic construct
HMTEVVRHCPHHERC

SEQ ID NO: 1169 - protein, 15 aa, Synthetic construct
TEVVRHCPHHERCSD

SEQ ID NO: 1170 - protein, 15 aa, Synthetic construct
EVVRHCPHHERCSDS

SEQ ID NO: 1171 - protein, 15 aa, Synthetic construct
CNSSCMGGMNQRPIL

SEQ ID NO: 1172 - protein, 15 aa, Synthetic construct
NSSCMGGMNQRPILT

SEQ ID NO: 1173 - protein, 15 aa, Synthetic construct
SCMGGMNQRPILTII

SEQ ID NO: 1174 - protein, 15 aa, Synthetic construct
MGGMNQRPILTIITL

SEQ ID NO: 1175 - protein, 15 aa, Synthetic construct
GGMNQRPILTIITLE

SEQ ID NO: 1176 - protein, 15 aa, Synthetic construct
CNSSCMGGMNWRPIL

SEQ ID NO: 1177 - protein, 15 aa, Synthetic construct
NSSCMGGMNWRPILT

SEQ ID NO: 1178 - protein, 15 aa, Synthetic construct
SCMGGMNWRPILTII

SEQ ID NO: 1179 - protein, 15 aa, Synthetic construct
MGGMNWRPILTIITL

SEQ ID NO: 1180 - protein, 15 aa, Synthetic construct
GGMNWRPILTIITLE

SEQ ID NO: 1181 - protein, 15 aa, Synthetic construct
NSSCMGGMNRSPILT

SEQ ID NO: 1182 - protein, 15 aa, Synthetic construct
SSCMGGMNRSPILTI

SEQ ID NO: 1183 - protein, 15 aa, Synthetic construct
CMGGMNRSPILTIIT

SEQ ID NO: 1184 - protein, 15 aa, Synthetic construct
GGMNRSPILTIITLE

SEQ ID NO: 1185 - protein, 15 aa, Synthetic construct
GMNRSPILTIITLED

SEQ ID NO: 1186 - protein, 15 aa, Synthetic construct
NSSCMGGMNRSPILT

SEQ ID NO: 1187 - protein, 15 aa, Synthetic construct
SSCMGGMNRSPILTI

SEQ ID NO: 1188 - protein, 15 aa, Synthetic construct
CMGGMNRSPILTIIT

SEQ ID NO: 1189 - protein, 15 aa, Synthetic construct
GGMNRSPILTIITLE

SEQ ID NO: 1190 - protein, 15 aa, Synthetic construct
GMNRSPILTIITLED

SEQ ID NO: 1191 - protein, 15 aa, Synthetic construct
NLLGRNSFEVCVCAC

SEQ ID NO: 1192 - protein, 15 aa, Synthetic construct
LLGRNSFEVCVCACP

SEQ ID NO: 1193 - protein, 15 aa, Synthetic construct
GRNSFEVCVCACPGR

SEQ ID NO: 1194 - protein, 15 aa, Synthetic construct
NSFEVCVCACPGRDR

SEQ ID NO: 1195 - protein, 15 aa, Synthetic construct
SFEVCVCACPGRDRR

SEQ ID NO: 1196 - protein, 15 aa, Synthetic construct
NLLGRNSFEVHVCAC

SEQ ID NO: 1197 - protein, 15 aa, Synthetic construct
LLGRNSFEVHVCACP

SEQ ID NO: 1198 - protein, 15 aa, Synthetic construct
GRNSFEVHVCACPGR

SEQ ID NO: 1199 - protein, 15 aa, Synthetic construct
NSFEVHVCACPGRDR

SEQ ID NO: 1200 - protein, 15 aa, Synthetic construct
SFEVHVCACPGRDRR

SEQ ID NO: 1201 - protein, 15 aa, Synthetic construct
NLLGRNSFEVLVCAC

SEQ ID NO: 1202 - protein, 15 aa, Synthetic construct
LLGRNSFEVLVCACP

SEQ ID NO: 1203 - protein, 15 aa, Synthetic construct
GRNSFEVLVCACPGR

SEQ ID NO: 1204 - protein, 15 aa, Synthetic construct
NSFEVLVCACPGRDR

SEQ ID NO: 1205 - protein, 15 aa, Synthetic construct
SFEVLVCACPGRDRR

SEQ ID NO: 1206 - protein, 15 aa, Synthetic construct
FEVRVCACPGKDRRT

SEQ ID NO: 1207 - protein, 15 aa, Synthetic construct
EVRVCACPGKDRRTE

SEQ ID NO: 1208 - protein, 15 aa, Synthetic construct
RVCACPGKDRRTEEE

SEQ ID NO: 1209 - protein, 15 aa, Synthetic construct
CACPGKDRRTEEENL

SEQ ID NO: 1210 - protein, 15 aa, Synthetic construct
ACPGKDRRTEEENLR

SEQ ID NO: 1211 - protein, 15 aa, Synthetic construct
FEVRVCACPGTDRRT

SEQ ID NO: 1212 - protein, 15 aa, Synthetic construct
EVRVCACPGTDRRTE

SEQ ID NO: 1213 - protein, 15 aa, Synthetic construct
RVCACPGTDRRTEEE

SEQ ID NO: 1214 - protein, 15 aa, Synthetic construct
CACPGTDRRTEEENL

SEQ ID NO: 1215 - protein, 15 aa, Synthetic construct
ACPGTDRRTEEENLR

SEQ ID NO: 1216 - protein, 15 aa, Synthetic construct
VRVCACPGRDWRTEE

SEQ ID NO: 1217 - protein, 15 aa, Synthetic construct
RVCACPGRDWRTEEE

SEQ ID NO: 1218 - protein, 15 aa, Synthetic construct
CACPGRDWRTEEENL

SEQ ID NO: 1219 - protein, 15 aa, Synthetic construct
CPGRDWRTEEENLRK

SEQ ID NO: 1220 - protein, 15 aa, Synthetic construct
PGRDWRTEEENLRKK

SEQ ID NO: 1221 - protein, 15 aa, Synthetic construct
TIHYNYMCNSFCMGG

SEQ ID NO: 1222 - protein, 15 aa, Synthetic construct
IHYNYMCNSFCMGGM

SEQ ID NO: 1223 - protein, 15 aa, Synthetic construct
YNYMCNSFCMGGMNR

SEQ ID NO: 1224 - protein, 15 aa, Synthetic construct
YMCNSFCMGGMNRRP

SEQ ID NO: 1225 - protein, 15 aa, Synthetic construct
MCNSFCMGGMNRRPI

SEQ ID NO: 1226 - protein, 15 aa, Synthetic construct
VDSTPPPGTRFRAMA

SEQ ID NO: 1227 - protein, 15 aa, Synthetic construct
DSTPPPGTRFRAMAI

SEQ ID NO: 1228 - protein, 15 aa, Synthetic construct
TPPPGTRFRAMAIYK

SEQ ID NO: 1229 - protein, 15 aa, Synthetic construct
PPGTRFRAMAIYKQS

SEQ ID NO: 1230 - protein, 15 aa, Synthetic construct
PGTRFRAMAIYKQSQ

SEQ ID NO: 1231 - protein, 15 aa, Synthetic construct
YKQSQHMTEVMRRCP

SEQ ID NO: 1232 - protein, 15 aa, Synthetic construct
KQSQHMTEVMRRCPH

SEQ ID NO: 1233 - protein, 15 aa, Synthetic construct
SQHMTEVMRRCPHHE

SEQ ID NO: 1234 - protein, 15 aa, Synthetic construct
HMTEVMRRCPHHERC

SEQ ID NO: 1235 - protein, 15 aa, Synthetic construct
MTEVMRRCPHHERCS

SEQ ID NO: 1236 - protein, 15 aa, Synthetic construct
GNLLGRNSFEMRVCA

SEQ ID NO: 1237 - protein, 15 aa, Synthetic construct
NLLGRNSFEMRVCAC

SEQ ID NO: 1238 - protein, 15 aa, Synthetic construct
LGRNSFEMRVCACPG

SEQ ID NO: 1239 - protein, 15 aa, Synthetic construct
RNSFEMRVCACPGRD

SEQ ID NO: 1240 - protein, 15 aa, Synthetic construct
NSFEMRVCACPGRDR

SEQ ID NO: 1241 - protein, 15 aa, Synthetic construct
PGTRVRAMAICKQSQ

SEQ ID NO: 1242 - protein, 15 aa, Synthetic construct
GTRVRAMAICKQSQH

SEQ ID NO: 1243 - protein, 15 aa, Synthetic construct
RVRAMAICKQSQHMT

SEQ ID NO: 1244 - protein, 15 aa, Synthetic construct
RAMAICKQSQHMTEV

SEQ ID NO: 1245 - protein, 15 aa, Synthetic construct
AMAICKQSQHMTEVV

SEQ ID NO: 1246 - protein, 15 aa, Synthetic construct
IRVEGNLRVECLDDR

SEQ ID NO: 1247 - protein, 15 aa, Synthetic construct
RVEGNLRVECLDDRN

SEQ ID NO: 1248 - protein, 15 aa, Synthetic construct
EGNLRVECLDDRNTF

SEQ ID NO: 1249 - protein, 15 aa, Synthetic construct
NLRVECLDDRNTFRH

SEQ ID NO: 1250 - protein, 15 aa, Synthetic construct
LRVECLDDRNTFRHS

SEQ ID NO: 1251 - protein, 15 aa, Synthetic construct
NTFRHSVVVPCEPPE

SEQ ID NO: 1252 - protein, 15 aa, Synthetic construct
TFRHSVVVPCEPPEV

SEQ ID NO: 1253 - protein, 15 aa, Synthetic construct
RHSVVVPCEPPEVGS

SEQ ID NO: 1254 - protein, 15 aa, Synthetic construct
SVVVPCEPPEVGSDC

SEQ ID NO: 1255 - protein, 15 aa, Synthetic construct
VVVPCEPPEVGSDCT

SEQ ID NO: 1256 - protein, 15 aa, Synthetic construct
EVGSDCTTIHCNYMC

SEQ ID NO: 1257 - protein, 15 aa, Synthetic construct
VGSDCTTIHCNYMCN

SEQ ID NO: 1258 - protein, 15 aa, Synthetic construct
SDCTTIHCNYMCNSS

SEQ ID NO: 1259 - protein, 15 aa, Synthetic construct
CTTIHCNYMCNSSCM

SEQ ID NO: 1260 - protein, 15 aa, Synthetic construct
TTIHCNYMCNSSCMG

SEQ ID NO: 1261 - protein, 5 aa, Synthetic construct
WLKGK

SEQ ID NO: 1262 - protein, 5 aa, Synthetic construct
LHRKY

SEQ ID NO: 1263 - protein, 5 aa, Synthetic construct
KRKIK

SEQ ID NO: 1264 - protein, 5 aa, Synthetic construct
GKITW

SEQ ID NO: 1265 - protein, 5 aa, Synthetic construct
KYKWR

SEQ ID NO: 1266 - protein, 5 aa, Synthetic construct
KYSFC

SEQ ID NO: 1267 - protein, 5 aa, Synthetic construct
YSGCN

SEQ ID NO: 1268 - protein, 5 aa, Synthetic construct
SGCIA

SEQ ID NO: 1269 - protein, 5 aa, Synthetic construct
FCIVK

SEQ ID NO: 1270 - protein, 5 aa, Synthetic construct
CNAKE

SEQ ID NO: 1271 - protein, 5 aa, Synthetic construct
ARLVS

SEQ ID NO: 1272 - protein, 5 aa, Synthetic construct
RRISK

SEQ ID NO: 1273 - protein, 5 aa, Synthetic construct
LISNA

SEQ ID NO: 1274 - protein, 5 aa, Synthetic construct
VSNGE

SEQ ID NO: 1275 - protein, 5 aa, Synthetic construct
SKAET

SEQ ID NO: 1276 - protein, 5 aa, Synthetic construct
DFLTE

SEQ ID NO: 1277 - protein, 5 aa, Synthetic construct
FGAEK

SEQ ID NO: 1278 - protein, 5 aa, Synthetic construct
LAESR

SEQ ID NO: 1279 - protein, 5 aa, Synthetic construct
TESWS

SEQ ID NO: 1280 - protein, 5 aa, Synthetic construct
EKRSG

SEQ ID NO: 1281 - protein, 5 aa, Synthetic construct
DFLTM

SEQ ID NO: 1282 - protein, 5 aa, Synthetic construct
FGAMK

SEQ ID NO: 1283 - protein, 5 aa, Synthetic construct
LAMSR

SEQ ID NO: 1284 - protein, 5 aa, Synthetic construct
TMSWS

SEQ ID NO: 1285 - protein, 5 aa, Synthetic construct
MKRSG

SEQ ID NO: 1286 - protein, 5 aa, Synthetic construct
TLRVY

SEQ ID NO: 1287 - protein, 5 aa, Synthetic construct
LTPYD

SEQ ID NO: 1288 - protein, 5 aa, Synthetic construct
RPYAA

SEQ ID NO: 1289 - protein, 5 aa, Synthetic construct
VYARE

SEQ ID NO: 1290 - protein, 5 aa, Synthetic construct
YDAEG

SEQ ID NO: 1291 - protein, 5 aa, Synthetic construct
QQYDC

SEQ ID NO: 1292 - protein, 5 aa, Synthetic construct
QSLCG

SEQ ID NO: 1293 - protein, 5 aa, Synthetic construct
YLCIH

SEQ ID NO: 1294 - protein, 5 aa, Synthetic construct
DCISG

SEQ ID NO: 1295 - protein, 5 aa, Synthetic construct
CGHGA

SEQ ID NO: 1296 - protein, 5 aa, Synthetic construct
LDGHC

SEQ ID NO: 1297 - protein, 5 aa, Synthetic construct
DSICG

SEQ ID NO: 1298 - protein, 5 aa, Synthetic construct
GICAT

SEQ ID NO: 1299 - protein, 5 aa, Synthetic construct
HCATT

SEQ ID NO: 1300 - protein, 5 aa, Synthetic construct
CGTTA

SEQ ID NO: 1301 - protein, 5 aa, Synthetic construct
LDGHF

SEQ ID NO: 1302 - protein, 5 aa, Synthetic construct
DSIFG

SEQ ID NO: 1303 - protein, 5 aa, Synthetic construct
GIFAT

SEQ ID NO: 1304 - protein, 5 aa, Synthetic construct
HFATT

SEQ ID NO: 1305 - protein, 5 aa, Synthetic construct
FGTTA

SEQ ID NO: 1306 - protein, 5 aa, Synthetic construct
ATTPP

SEQ ID NO: 1307 - protein, 5 aa, Synthetic construct
TTAPL

SEQ ID NO: 1308 - protein, 5 aa, Synthetic construct
TAPSG

SEQ ID NO: 1309 - protein, 5 aa, Synthetic construct
PPSKG

SEQ ID NO: 1310 - protein, 5 aa, Synthetic construct
PLGGN

SEQ ID NO: 1311 - protein, 5 aa, Synthetic construct
IHGTA

SEQ ID NO: 1312 - protein, 5 aa, Synthetic construct
HSAAT

SEQ ID NO: 1313 - protein, 5 aa, Synthetic construct
GAAAP

SEQ ID NO: 1314 - protein, 5 aa, Synthetic construct
TAASL

SEQ ID NO: 1315 - protein, 5 aa, Synthetic construct
ATPLS

SEQ ID NO: 1316 - protein, 5 aa, Synthetic construct
GKSGV

SEQ ID NO: 1317 - protein, 5 aa, Synthetic construct
KYFVT

SEQ ID NO: 1318 - protein, 5 aa, Synthetic construct
SFVCV

SEQ ID NO: 1319 - protein, 5 aa, Synthetic construct
GVCKK

SEQ ID NO: 1320 - protein, 5 aa, Synthetic construct
VTVKC

SEQ ID NO: 1321 - protein, 5 aa, Synthetic construct
VKCAV

SEQ ID NO: 1322 - protein, 5 aa, Synthetic construct
KTPVV

SEQ ID NO: 1323 - protein, 5 aa, Synthetic construct
CPVMG

SEQ ID NO: 1324 - protein, 5 aa, Synthetic construct
AVMEN

SEQ ID NO: 1325 - protein, 5 aa, Synthetic construct
VVGNN

SEQ ID NO: 1326 - protein, 5 aa, Synthetic construct
KIDGR

SEQ ID NO: 1327 - protein, 5 aa, Synthetic construct
ITFRA

SEQ ID NO: 1328 - protein, 5 aa, Synthetic construct
DFRKL

SEQ ID NO: 1329 - protein, 5 aa, Synthetic construct
GRKLG

SEQ ID NO: 1330 - protein, 5 aa, Synthetic construct
RALGA

SEQ ID NO: 1331 - protein, 5 aa, Synthetic construct
GHSVC

SEQ ID NO: 1332 - protein, 5 aa, Synthetic construct
HTTCC

SEQ ID NO: 1333 - protein, 5 aa, Synthetic construct
STCMH

SEQ ID NO: 1334 - protein, 5 aa, Synthetic construct
VCMLH

SEQ ID NO: 1335 - protein, 5 aa, Synthetic construct
CCHHE

SEQ ID NO: 1336 - protein, 5 aa, Synthetic construct
GHSVG

SEQ ID NO: 1337 - protein, 5 aa, Synthetic construct
HTTGC

SEQ ID NO: 1338 - protein, 5 aa, Synthetic construct
STGMH

SEQ ID NO: 1339 - protein, 5 aa, Synthetic construct
VGMLH

SEQ ID NO: 1340 - protein, 5 aa, Synthetic construct
GCHHE

SEQ ID NO: 1341 - protein, 5 aa, Synthetic construct
RVSSQ

SEQ ID NO: 1342 - protein, 5 aa, Synthetic construct
VVGQD

SEQ ID NO: 1343 - protein, 5 aa, Synthetic construct
SGQAT

SEQ ID NO: 1344 - protein, 5 aa, Synthetic construct
SQALR

SEQ ID NO: 1345 - protein, 5 aa, Synthetic construct
QDTRV

SEQ ID NO: 1346 - protein, 5 aa, Synthetic construct
GHAVC

SEQ ID NO: 1347 - protein, 5 aa, Synthetic construct
HVACC

SEQ ID NO: 1348 - protein, 5 aa, Synthetic construct
AACVQ

SEQ ID NO: 1349 - protein, 5 aa, Synthetic construct
VCVYD

SEQ ID NO: 1350 - protein, 5 aa, Synthetic construct
CCQDG

SEQ ID NO: 1351 - protein, 5 aa, Synthetic construct
GHAVG

SEQ ID NO: 1352 - protein, 5 aa, Synthetic construct
HVAGC

SEQ ID NO: 1353 - protein, 5 aa, Synthetic construct
AAGVQ

SEQ ID NO: 1354 - protein, 5 aa, Synthetic construct
VGVYD

SEQ ID NO: 1355 - protein, 5 aa, Synthetic construct
GCQDG

SEQ ID NO: 1356 - protein, 5 aa, Synthetic construct
LDVRW

SEQ ID NO: 1357 - protein, 5 aa, Synthetic construct
DVEWP

SEQ ID NO: 1358 - protein, 5 aa, Synthetic construct
VEWHR

SEQ ID NO: 1359 - protein, 5 aa, Synthetic construct
RWHPI

SEQ ID NO: 1360 - protein, 5 aa, Synthetic construct
WPRIL

SEQ ID NO: 1361 - protein, 5 aa, Synthetic construct
LDLRC

SEQ ID NO: 1362 - protein, 5 aa, Synthetic construct
DVECP

SEQ ID NO: 1363 - protein, 5 aa, Synthetic construct
LECHR

SEQ ID NO: 1364 - protein, 5 aa, Synthetic construct
RCHPI

SEQ ID NO: 1365 - protein, 5 aa, Synthetic construct
CPRIL

SEQ ID NO: 1366 - protein, 5 aa, Synthetic construct
MVVGL

SEQ ID NO: 1367 - protein, 5 aa, Synthetic construct
VDGLR

SEQ ID NO: 1368 - protein, 5 aa, Synthetic construct
VGLSE

SEQ ID NO: 1369 - protein, 5 aa, Synthetic construct
GLSRR

SEQ ID NO: 1370 - protein, 5 aa, Synthetic construct
LRERK

SEQ ID NO: 1371 - protein, 5 aa, Synthetic construct
MVVGL

SEQ ID NO: 1372 - protein, 5 aa, Synthetic construct
VDGLR

SEQ ID NO: 1373 - protein, 5 aa, Synthetic construct
VGLSE

SEQ ID NO: 1374 - protein, 5 aa, Synthetic construct
GLSRR

SEQ ID NO: 1375 - protein, 5 aa, Synthetic construct
LRERK

SEQ ID NO: 1376 - protein, 5 aa, Synthetic construct
MVVGP

SEQ ID NO: 1377 - protein, 5 aa, Synthetic construct
VDGPR

SEQ ID NO: 1378 - protein, 5 aa, Synthetic construct
VGPSE

SEQ ID NO: 1379 - protein, 5 aa, Synthetic construct
GPSRR

SEQ ID NO: 1380 - protein, 5 aa, Synthetic construct
PRERK

SEQ ID NO: 1381 - protein, 5 aa, Synthetic construct
QDLCC

SEQ ID NO: 1382 - protein, 5 aa, Synthetic construct
DLRCV

SEQ ID NO: 1383 - protein, 5 aa, Synthetic construct
LRCLT

SEQ ID NO: 1384 - protein, 5 aa, Synthetic construct
CCLSG

SEQ ID NO: 1385 - protein, 5 aa, Synthetic construct
CVTGI

SEQ ID NO: 1386 - protein, 5 aa, Synthetic construct
ILTGR

SEQ ID NO: 1387 - protein, 5 aa, Synthetic construct
LDARE

SEQ ID NO: 1388 - protein, 5 aa, Synthetic construct
TAREY

SEQ ID NO: 1389 - protein, 5 aa, Synthetic construct
GRESA

SEQ ID NO: 1390 - protein, 5 aa, Synthetic construct
REYAM

SEQ ID NO: 1391 - protein, 5 aa, Synthetic construct
PFEST

SEQ ID NO: 1392 - protein, 5 aa, Synthetic construct
FITTK

SEQ ID NO: 1393 - protein, 5 aa, Synthetic construct
ETTTR

SEQ ID NO: 1394 - protein, 5 aa, Synthetic construct
STTQR

SEQ ID NO: 1395 - protein, 5 aa, Synthetic construct
TKRRV

SEQ ID NO: 1396 - protein, 5 aa, Synthetic construct
LVVAA

SEQ ID NO: 1397 - protein, 5 aa, Synthetic construct
VVGAG

SEQ ID NO: 1398 - protein, 5 aa, Synthetic construct
VGAVG

SEQ ID NO: 1399 - protein, 5 aa, Synthetic construct
AAVKS

SEQ ID NO: 1400 - protein, 5 aa, Synthetic construct
AGGSA

SEQ ID NO: 1401 - protein, 5 aa, Synthetic construct
LVVAC

SEQ ID NO: 1402 - protein, 5 aa, Synthetic construct
VVGCG

SEQ ID NO: 1403 - protein, 5 aa, Synthetic construct
VGCVG

SEQ ID NO: 1404 - protein, 5 aa, Synthetic construct
ACVKS

SEQ ID NO: 1405 - protein, 5 aa, Synthetic construct
CGGSA

SEQ ID NO: 1406 - protein, 5 aa, Synthetic construct
LVVAD

SEQ ID NO: 1407 - protein, 5 aa, Synthetic construct
VVGDG

SEQ ID NO: 1408 - protein, 5 aa, Synthetic construct
VGDVG

SEQ ID NO: 1409 - protein, 5 aa, Synthetic construct
ADVKS

SEQ ID NO: 1410 - protein, 5 aa, Synthetic construct
DGGSA

SEQ ID NO: 1411 - protein, 5 aa, Synthetic construct
LVVAR

SEQ ID NO: 1412 - protein, 5 aa, Synthetic construct
VVGRG

SEQ ID NO: 1413 - protein, 5 aa, Synthetic construct
VGRVG

SEQ ID NO: 1414 - protein, 5 aa, Synthetic construct
ARVKS

SEQ ID NO: 1415 - protein, 5 aa, Synthetic construct
RGGSA

SEQ ID NO: 1416 - protein, 5 aa, Synthetic construct
LVVAS

SEQ ID NO: 1417 - protein, 5 aa, Synthetic construct
VVGSG

SEQ ID NO: 1418 - protein, 5 aa, Synthetic construct
VGSVG

SEQ ID NO: 1419 - protein, 5 aa, Synthetic construct
ASVKS

SEQ ID NO: 1420 - protein, 5 aa, Synthetic construct
SGGSA

SEQ ID NO: 1421 - protein, 5 aa, Synthetic construct
LVVAV

SEQ ID NO: 1422 - protein, 5 aa, Synthetic construct
VVGVG

SEQ ID NO: 1423 - protein, 5 aa, Synthetic construct
VGVVG

SEQ ID NO: 1424 - protein, 5 aa, Synthetic construct
AVVKS

SEQ ID NO: 1425 - protein, 5 aa, Synthetic construct
VGGSA

SEQ ID NO: 1426 - protein, 5 aa, Synthetic construct
VVGGC

SEQ ID NO: 1427 - protein, 5 aa, Synthetic construct
VVACV

SEQ ID NO: 1428 - protein, 5 aa, Synthetic construct
GACGK

SEQ ID NO: 1429 - protein, 5 aa, Synthetic construct
GCGSA

SEQ ID NO: 1430 - protein, 5 aa, Synthetic construct
CVKAL

SEQ ID NO: 1431 - protein, 5 aa, Synthetic construct
VVGGD

SEQ ID NO: 1432 - protein, 5 aa, Synthetic construct
VVADV

SEQ ID NO: 1433 - protein, 5 aa, Synthetic construct
GADGK

SEQ ID NO: 1434 - protein, 5 aa, Synthetic construct
GDGSA

SEQ ID NO: 1435 - protein, 5 aa, Synthetic construct
DVKAL

SEQ ID NO: 1436 - protein, 5 aa, Synthetic construct
ILTGH

SEQ ID NO: 1437 - protein, 5 aa, Synthetic construct
LDAHE

SEQ ID NO: 1438 - protein, 5 aa, Synthetic construct
TAHEY

SEQ ID NO: 1439 - protein, 5 aa, Synthetic construct
GHESA

SEQ ID NO: 1440 - protein, 5 aa, Synthetic construct
HEYAM

SEQ ID NO: 1441 - protein, 5 aa, Synthetic construct
ILTGH

SEQ ID NO: 1442 - protein, 5 aa, Synthetic construct
LDAHE

SEQ ID NO: 1443 - protein, 5 aa, Synthetic construct
TAHEY

SEQ ID NO: 1444 - protein, 5 aa, Synthetic construct
GHESA

SEQ ID NO: 1445 - protein, 5 aa, Synthetic construct
HEYAM

SEQ ID NO: 1446 - protein, 5 aa, Synthetic construct
ILTGL

SEQ ID NO: 1447 - protein, 5 aa, Synthetic construct
LDALE

SEQ ID NO: 1448 - protein, 5 aa, Synthetic construct
TALEY

SEQ ID NO: 1449 - protein, 5 aa, Synthetic construct
GLESA

SEQ ID NO: 1450 - protein, 5 aa, Synthetic construct
LEYAM

SEQ ID NO: 1451 - protein, 5 aa, Synthetic construct
LVVAD

SEQ ID NO: 1452 - protein, 5 aa, Synthetic construct
VVGDG

SEQ ID NO: 1453 - protein, 5 aa, Synthetic construct
VGDVG

SEQ ID NO: 1454 - protein, 5 aa, Synthetic construct
ADVKS

SEQ ID NO: 1455 - protein, 5 aa, Synthetic construct
DGGSA

SEQ ID NO: 1456 - protein, 5 aa, Synthetic construct
VVGGD

SEQ ID NO: 1457 - protein, 5 aa, Synthetic construct
VVADV

SEQ ID NO: 1458 - protein, 5 aa, Synthetic construct
GADGK

SEQ ID NO: 1459 - protein, 5 aa, Synthetic construct
GDGSA

SEQ ID NO: 1460 - protein, 5 aa, Synthetic construct
DVKAL

SEQ ID NO: 1461 - protein, 5 aa, Synthetic construct
VVGGR

SEQ ID NO: 1462 - protein, 5 aa, Synthetic construct
VVARV

SEQ ID NO: 1463 - protein, 5 aa, Synthetic construct
GARGK

SEQ ID NO: 1464 - protein, 5 aa, Synthetic construct
GRGSA

SEQ ID NO: 1465 - protein, 5 aa, Synthetic construct
RVKAL

SEQ ID NO: 1466 - protein, 5 aa, Synthetic construct
ILTGK

SEQ ID NO: 1467 - protein, 5 aa, Synthetic construct
LDAKE

SEQ ID NO: 1468 - protein, 5 aa, Synthetic construct
TAKEY

SEQ ID NO: 1469 - protein, 5 aa, Synthetic construct
GKESA

SEQ ID NO: 1470 - protein, 5 aa, Synthetic construct
KEYAM

SEQ ID NO: 1471 - protein, 5 aa, Synthetic construct
ILTGL

SEQ ID NO: 1472 - protein, 5 aa, Synthetic construct
LDALE

SEQ ID NO: 1473 - protein, 5 aa, Synthetic construct
TALEY

SEQ ID NO: 1474 - protein, 5 aa, Synthetic construct
GLESA

SEQ ID NO: 1475 - protein, 5 aa, Synthetic construct
LEYAM

SEQ ID NO: 1476 - protein, 5 aa, Synthetic construct
LCDTR

SEQ ID NO: 1477 - protein, 5 aa, Synthetic construct
CSDRM

SEQ ID NO: 1478 - protein, 5 aa, Synthetic construct
DDRVR

SEQ ID NO: 1479 - protein, 5 aa, Synthetic construct
TRVRA

SEQ ID NO: 1480 - protein, 5 aa, Synthetic construct
RMRAA

SEQ ID NO: 1481 - protein, 5 aa, Synthetic construct
DTMRW

SEQ ID NO: 1482 - protein, 5 aa, Synthetic construct
TPVWA

SEQ ID NO: 1483 - protein, 5 aa, Synthetic construct
MVWAA

SEQ ID NO: 1484 - protein, 5 aa, Synthetic construct
RWASK

SEQ ID NO: 1485 - protein, 5 aa, Synthetic construct
WAAKL

SEQ ID NO: 1486 - protein, 5 aa, Synthetic construct
CKGGG

SEQ ID NO: 1487 - protein, 5 aa, Synthetic construct
KAKGT

SEQ ID NO: 1488 - protein, 5 aa, Synthetic construct
GKGGV

SEQ ID NO: 1489 - protein, 5 aa, Synthetic construct
GGGMI

SEQ ID NO: 1490 - protein, 5 aa, Synthetic construct
GTVIC

SEQ ID NO: 1491 - protein, 5 aa, Synthetic construct
CKGGQ

SEQ ID NO: 1492 - protein, 5 aa, Synthetic construct
KAKQT

SEQ ID NO: 1493 - protein, 5 aa, Synthetic construct
GKQGV

SEQ ID NO: 1494 - protein, 5 aa, Synthetic construct
GQGMI

SEQ ID NO: 1495 - protein, 5 aa, Synthetic construct
QTVIC

SEQ ID NO: 1496 - protein, 5 aa, Synthetic construct
DPGDH

SEQ ID NO: 1497 - protein, 5 aa, Synthetic construct
PSGHF

SEQ ID NO: 1498 - protein, 5 aa, Synthetic construct
GGHCL

SEQ ID NO: 1499 - protein, 5 aa, Synthetic construct
DHCGQ

SEQ ID NO: 1500 - protein, 5 aa, Synthetic construct
HFLQL

SEQ ID NO: 1501 - protein, 5 aa, Synthetic construct
TEVRF

SEQ ID NO: 1502 - protein, 5 aa, Synthetic construct
EVRFP

SEQ ID NO: 1503 - protein, 5 aa, Synthetic construct
VRFHH

SEQ ID NO: 1504 - protein, 5 aa, Synthetic construct
RFHER

SEQ ID NO: 1505 - protein, 5 aa, Synthetic construct
FPHRC

SEQ ID NO: 1506 - protein, 5 aa, Synthetic construct
TEVRY

SEQ ID NO: 1507 - protein, 5 aa, Synthetic construct
EVRYP

SEQ ID NO: 1508 - protein, 5 aa, Synthetic construct
VRYHH

SEQ ID NO: 1509 - protein, 5 aa, Synthetic construct
RYHER

SEQ ID NO: 1510 - protein, 5 aa, Synthetic construct
YPHRC

SEQ ID NO: 1511 - protein, 5 aa, Synthetic construct
IHNMY

SEQ ID NO: 1512 - protein, 5 aa, Synthetic construct
HYYYN

SEQ ID NO: 1513 - protein, 5 aa, Synthetic construct
NYYSS

SEQ ID NO: 1514 - protein, 5 aa, Synthetic construct
MYSCM

SEQ ID NO: 1515 - protein, 5 aa, Synthetic construct
YNSMG

SEQ ID NO: 1516 - protein, 5 aa, Synthetic construct
SFVVY

SEQ ID NO: 1517 - protein, 5 aa, Synthetic construct
FERYA

SEQ ID NO: 1518 - protein, 5 aa, Synthetic construct
VRYCP

SEQ ID NO: 1519 - protein, 5 aa, Synthetic construct
VYCGR

SEQ ID NO: 1520 - protein, 5 aa, Synthetic construct
YAPRD

SEQ ID NO: 1521 - protein, 5 aa, Synthetic construct
GRRTK

SEQ ID NO: 1522 - protein, 5 aa, Synthetic construct
RDRKE

SEQ ID NO: 1523 - protein, 5 aa, Synthetic construct
RRKEN

SEQ ID NO: 1524 - protein, 5 aa, Synthetic construct
TKELR

SEQ ID NO: 1525 - protein, 5 aa, Synthetic construct
KENRK

SEQ ID NO: 1526 - protein, 5 aa, Synthetic construct
RDREK

SEQ ID NO: 1527 - protein, 5 aa, Synthetic construct
DRTKE

SEQ ID NO: 1528 - protein, 5 aa, Synthetic construct
RTKNL

SEQ ID NO: 1529 - protein, 5 aa, Synthetic construct
EKNRK

SEQ ID NO: 1530 - protein, 5 aa, Synthetic construct
KELKK

SEQ ID NO: 1531 - protein, 5 aa, Synthetic construct
NSCGD

SEQ ID NO: 1532 - protein, 5 aa, Synthetic construct
SSMDM

SEQ ID NO: 1533 - protein, 5 aa, Synthetic construct
CMDNR

SEQ ID NO: 1534 - protein, 5 aa, Synthetic construct
GDNRP

SEQ ID NO: 1535 - protein, 5 aa, Synthetic construct
DMRPI

SEQ ID NO: 1536 - protein, 5 aa, Synthetic construct
NSCGS

SEQ ID NO: 1537 - protein, 5 aa, Synthetic construct
SSMSM

SEQ ID NO: 1538 - protein, 5 aa, Synthetic construct
CMSNR

SEQ ID NO: 1539 - protein, 5 aa, Synthetic construct
GSNRP

SEQ ID NO: 1540 - protein, 5 aa, Synthetic construct
SMRPI

SEQ ID NO: 1541 - protein, 5 aa, Synthetic construct
NSCGV

SEQ ID NO: 1542 - protein, 5 aa, Synthetic construct
SSMVM

SEQ ID NO: 1543 - protein, 5 aa, Synthetic construct
CMVNR

SEQ ID NO: 1544 - protein, 5 aa, Synthetic construct
GVNRP

SEQ ID NO: 1545 - protein, 5 aa, Synthetic construct
VMRPI

SEQ ID NO: 1546 - protein, 5 aa, Synthetic construct
VRCHR

SEQ ID NO: 1547 - protein, 5 aa, Synthetic construct
RRPRE

SEQ ID NO: 1548 - protein, 5 aa, Synthetic construct
CPRRC

SEQ ID NO: 1549 - protein, 5 aa, Synthetic construct
HRRSD

SEQ ID NO: 1550 - protein, 5 aa, Synthetic construct
RECDS

SEQ ID NO: 1551 - protein, 5 aa, Synthetic construct
VRCHY

SEQ ID NO: 1552 - protein, 5 aa, Synthetic construct
RRPYE

SEQ ID NO: 1553 - protein, 5 aa, Synthetic construct
CPYRC

SEQ ID NO: 1554 - protein, 5 aa, Synthetic construct
HYRSD

SEQ ID NO: 1555 - protein, 5 aa, Synthetic construct
YECDS

SEQ ID NO: 1556 - protein, 5 aa, Synthetic construct
GLPQR

SEQ ID NO: 1557 - protein, 5 aa, Synthetic construct
LAPRL

SEQ ID NO: 1558 - protein, 5 aa, Synthetic construct
PPRIR

SEQ ID NO: 1559 - protein, 5 aa, Synthetic construct
QRIVE

SEQ ID NO: 1560 - protein, 5 aa, Synthetic construct
RLREG

SEQ ID NO: 1561 - protein, 5 aa, Synthetic construct
APQLT

SEQ ID NO: 1562 - protein, 5 aa, Synthetic construct
PPHTR

SEQ ID NO: 1563 - protein, 5 aa, Synthetic construct
QHTVE

SEQ ID NO: 1564 - protein, 5 aa, Synthetic construct
LTVGN

SEQ ID NO: 1565 - protein, 5 aa, Synthetic construct
TRENL

SEQ ID NO: 1566 - protein, 5 aa, Synthetic construct
LAPHR

SEQ ID NO: 1567 - protein, 5 aa, Synthetic construct
APQRI

SEQ ID NO: 1568 - protein, 5 aa, Synthetic construct
PQRRV

SEQ ID NO: 1569 - protein, 5 aa, Synthetic construct
HRREG

SEQ ID NO: 1570 - protein, 5 aa, Synthetic construct
RIVGN

SEQ ID NO: 1571 - protein, 5 aa, Synthetic construct
LWDTS

SEQ ID NO: 1572 - protein, 5 aa, Synthetic construct
WVSSP

SEQ ID NO: 1573 - protein, 5 aa, Synthetic construct
DSSPG

SEQ ID NO: 1574 - protein, 5 aa, Synthetic construct
TSPTR

SEQ ID NO: 1575 - protein, 5 aa, Synthetic construct
SPGRV

SEQ ID NO: 1576 - protein, 5 aa, Synthetic construct
PPTVH

SEQ ID NO: 1577 - protein, 5 aa, Synthetic construct
PGRHA

SEQ ID NO: 1578 - protein, 5 aa, Synthetic construct
TRHMA

SEQ ID NO: 1579 - protein, 5 aa, Synthetic construct
VHMIY

SEQ ID NO: 1580 - protein, 5 aa, Synthetic construct
HAAYK

SEQ ID NO: 1581 - protein, 5 aa, Synthetic construct
PPTVL

SEQ ID NO: 1582 - protein, 5 aa, Synthetic construct
PGRLA

SEQ ID NO: 1583 - protein, 5 aa, Synthetic construct
TRLMA

SEQ ID NO: 1584 - protein, 5 aa, Synthetic construct
VLMIY

SEQ ID NO: 1585 - protein, 5 aa, Synthetic construct
LAAYK

SEQ ID NO: 1586 - protein, 5 aa, Synthetic construct
MTVRH

SEQ ID NO: 1587 - protein, 5 aa, Synthetic construct
TEVHC

SEQ ID NO: 1588 - protein, 5 aa, Synthetic construct
VVHPH

SEQ ID NO: 1589 - protein, 5 aa, Synthetic construct
RHPHE

SEQ ID NO: 1590 - protein, 5 aa, Synthetic construct
HCHER

SEQ ID NO: 1591 - protein, 5 aa, Synthetic construct
CMGNQ

SEQ ID NO: 1592 - protein, 5 aa, Synthetic construct
MGMQR

SEQ ID NO: 1593 - protein, 5 aa, Synthetic construct
GMQPI

SEQ ID NO: 1594 - protein, 5 aa, Synthetic construct
NQPLT

SEQ ID NO: 1595 - protein, 5 aa, Synthetic construct
QRITI

SEQ ID NO: 1596 - protein, 5 aa, Synthetic construct
CMGNW

SEQ ID NO: 1597 - protein, 5 aa, Synthetic construct
MGMWR

SEQ ID NO: 1598 - protein, 5 aa, Synthetic construct
GMWPI

SEQ ID NO: 1599 - protein, 5 aa, Synthetic construct
NWPLT

SEQ ID NO: 1600 - protein, 5 aa, Synthetic construct
WRITI

SEQ ID NO: 1601 - protein, 5 aa, Synthetic construct
MGMRS

SEQ ID NO: 1602 - protein, 5 aa, Synthetic construct
GGNSP

SEQ ID NO: 1603 - protein, 5 aa, Synthetic construct
MNSIL

SEQ ID NO: 1604 - protein, 5 aa, Synthetic construct
RSITI

SEQ ID NO: 1605 - protein, 5 aa, Synthetic construct
SPLII

SEQ ID NO: 1606 - protein, 5 aa, Synthetic construct
MGMRS

SEQ ID NO: 1607 - protein, 5 aa, Synthetic construct
GGNSP

SEQ ID NO: 1608 - protein, 5 aa, Synthetic construct
MNSIL

SEQ ID NO: 1609 - protein, 5 aa, Synthetic construct
RSITI

SEQ ID NO: 1610 - protein, 5 aa, Synthetic construct
SPLII

SEQ ID NO: 1611 - protein, 5 aa, Synthetic construct
RNFVC

SEQ ID NO: 1612 - protein, 5 aa, Synthetic construct
NSECV

SEQ ID NO: 1613 - protein, 5 aa, Synthetic construct
FECCA

SEQ ID NO: 1614 - protein, 5 aa, Synthetic construct
VCCCP

SEQ ID NO: 1615 - protein, 5 aa, Synthetic construct
CVAPG

SEQ ID NO: 1616 - protein, 5 aa, Synthetic construct
RNFVH

SEQ ID NO: 1617 - protein, 5 aa, Synthetic construct
NSEHV

SEQ ID NO: 1618 - protein, 5 aa, Synthetic construct
FEHCA

SEQ ID NO: 1619 - protein, 5 aa, Synthetic construct
VHCCP

SEQ ID NO: 1620 - protein, 5 aa, Synthetic construct
HVAPG

SEQ ID NO: 1621 - protein, 5 aa, Synthetic construct
RNFVL

SEQ ID NO: 1622 - protein, 5 aa, Synthetic construct
NSELV

SEQ ID NO: 1623 - protein, 5 aa, Synthetic construct
FELCA

SEQ ID NO: 1624 - protein, 5 aa, Synthetic construct
VLCCP

SEQ ID NO: 1625 - protein, 5 aa, Synthetic construct
LVAPG

SEQ ID NO: 1626 - protein, 5 aa, Synthetic construct
VCCGK

SEQ ID NO: 1627 - protein, 5 aa, Synthetic construct
CAPKD

SEQ ID NO: 1628 - protein, 5 aa, Synthetic construct
CPKRR

SEQ ID NO: 1629 - protein, 5 aa, Synthetic construct
GKRTE

SEQ ID NO: 1630 - protein, 5 aa, Synthetic construct
KDREE

SEQ ID NO: 1631 - protein, 5 aa, Synthetic construct
VCCGT

SEQ ID NO: 1632 - protein, 5 aa, Synthetic construct
CAPTD

SEQ ID NO: 1633 - protein, 5 aa, Synthetic construct
CPTRR

SEQ ID NO: 1634 - protein, 5 aa, Synthetic construct
GTRTE

SEQ ID NO: 1635 - protein, 5 aa, Synthetic construct
TDREE

SEQ ID NO: 1636 - protein, 5 aa, Synthetic construct
ACGDW

SEQ ID NO: 1637 - protein, 5 aa, Synthetic construct
CPRWR

SEQ ID NO: 1638 - protein, 5 aa, Synthetic construct
GRWTE

SEQ ID NO: 1639 - protein, 5 aa, Synthetic construct
DWTEE

SEQ ID NO: 1640 - protein, 5 aa, Synthetic construct
WREEN

SEQ ID NO: 1641 - protein, 5 aa, Synthetic construct
NYCSF

SEQ ID NO: 1642 - protein, 5 aa, Synthetic construct
YMNFC

SEQ ID NO: 1643 - protein, 5 aa, Synthetic construct
CNFMG

SEQ ID NO: 1644 - protein, 5 aa, Synthetic construct
SFMGM

SEQ ID NO: 1645 - protein, 5 aa, Synthetic construct
FCGMN

SEQ ID NO: 1646 - protein, 5 aa, Synthetic construct
PPGRF

SEQ ID NO: 1647 - protein, 5 aa, Synthetic construct
PPTFR

SEQ ID NO: 1648 - protein, 5 aa, Synthetic construct
GTFAM

SEQ ID NO: 1649 - protein, 5 aa, Synthetic construct
RFAAI

SEQ ID NO: 1650 - protein, 5 aa, Synthetic construct
FRMIY

SEQ ID NO: 1651 - protein, 5 aa, Synthetic construct
QHTVM

SEQ ID NO: 1652 - protein, 5 aa, Synthetic construct
HMEMR

SEQ ID NO: 1653 - protein, 5 aa, Synthetic construct
TEMRC

SEQ ID NO: 1654 - protein, 5 aa, Synthetic construct
VMRPH

SEQ ID NO: 1655 - protein, 5 aa, Synthetic construct
MRCHH

SEQ ID NO: 1656 - protein, 5 aa, Synthetic construct
GRSEM

SEQ ID NO: 1657 - protein, 5 aa, Synthetic construct
RNFMR

SEQ ID NO: 1658 - protein, 5 aa, Synthetic construct
SFMVC

SEQ ID NO: 1659 - protein, 5 aa, Synthetic construct
EMVAC

SEQ ID NO: 1660 - protein, 5 aa, Synthetic construct
MRCCP

SEQ ID NO: 1661 - protein, 5 aa, Synthetic construct
VRMIC

SEQ ID NO: 1662 - protein, 5 aa, Synthetic construct
RAACK

SEQ ID NO: 1663 - protein, 5 aa, Synthetic construct
MACQS

SEQ ID NO: 1664 - protein, 5 aa, Synthetic construct
ICQQH

SEQ ID NO: 1665 - protein, 5 aa, Synthetic construct
CKSHM

SEQ ID NO: 1666 - protein, 5 aa, Synthetic construct
GNREC

SEQ ID NO: 1667 - protein, 5 aa, Synthetic construct
NLVCL

SEQ ID NO: 1668 - protein, 5 aa, Synthetic construct
RVCDD

SEQ ID NO: 1669 - protein, 5 aa, Synthetic construct
ECDRN

SEQ ID NO: 1670 - protein, 5 aa, Synthetic construct
CLDNT

SEQ ID NO: 1671 - protein, 5 aa, Synthetic construct
HSVPC

SEQ ID NO: 1672 - protein, 5 aa, Synthetic construct
SVVCE

SEQ ID NO: 1673 - protein, 5 aa, Synthetic construct
VVCPP

SEQ ID NO: 1674 - protein, 5 aa, Synthetic construct
PCPEV

SEQ ID NO: 1675 - protein, 5 aa, Synthetic construct
CEPVG

SEQ ID NO: 1676 - protein, 5 aa, Synthetic construct
DCTHC

SEQ ID NO: 1677 - protein, 5 aa, Synthetic construct
CTICN

SEQ ID NO: 1678 - protein, 5 aa, Synthetic construct
TICYM

SEQ ID NO: 1679 - protein, 5 aa, Synthetic construct
HCYCN

SEQ ID NO: 1680 - protein, 5 aa, Synthetic construct
CNMNS

SEQ ID NO: 1681 - protein, 15 aa, Synthetic construct
ADPATLTRPVYDAAR

SEQ ID NO: 1682 - protein, 15 aa, Synthetic construct
DPATLTRPVYDAARE

SEQ ID NO: 1683 - protein, 15 aa, Synthetic construct
PATLTRPVYDAAREG

SEQ ID NO: 1684 - protein, 15 aa, Synthetic construct
ATLTRPVYDAAREGF

SEQ ID NO: 1685 - protein, 15 aa, Synthetic construct
TLTRPVYDAAREGFL

SEQ ID NO: 1686 - protein, 15 aa, Synthetic construct
LTRPVYDAAREGFLD

SEQ ID NO: 1687 - protein, 15 aa, Synthetic construct
TRPVYDAAREGFLDT

SEQ ID NO: 1688 - protein, 15 aa, Synthetic construct
RPVYDAAREGFLDTL

SEQ ID NO: 1689 - protein, 15 aa, Synthetic construct
SHWQQQSYLDCGIHS

SEQ ID NO: 1690 - protein, 15 aa, Synthetic construct
HWQQQSYLDCGIHSG

SEQ ID NO: 1691 - protein, 15 aa, Synthetic construct
WQQQSYLDCGIHSGA

SEQ ID NO: 1692 - protein, 15 aa, Synthetic construct
QQQSYLDCGIHSGAT

SEQ ID NO: 1693 - protein, 15 aa, Synthetic construct
QQSYLDCGIHSGATT

SEQ ID NO: 1694 - protein, 15 aa, Synthetic construct
QSYLDCGIHSGATTT

SEQ ID NO: 1695 - protein, 15 aa, Synthetic construct
SYLDCGIHSGATTTA

SEQ ID NO: 1696 - protein, 15 aa, Synthetic construct
YLDCGIHSGATTTAP

SEQ ID NO: 1697 - protein, 15 aa, Synthetic construct
HTYHLDVVERWPHRP

SEQ ID NO: 1698 - protein, 15 aa, Synthetic construct
TYHLDVVERWPHRPI

SEQ ID NO: 1699 - protein, 15 aa, Synthetic construct
YHLDVVERWPHRPIL

SEQ ID NO: 1700 - protein, 15 aa, Synthetic construct
HLDVVERWPHRPILQ

SEQ ID NO: 1701 - protein, 15 aa, Synthetic construct
LDVVERWPHRPILQA

SEQ ID NO: 1702 - protein, 15 aa, Synthetic construct
DVVERWPHRPILQAG

SEQ ID NO: 1703 - protein, 15 aa, Synthetic construct
VVERWPHRPILQAGL

SEQ ID NO: 1704 - protein, 15 aa, Synthetic construct
VERWPHRPILQAGLP

SEQ ID NO: 1705 - protein, 15 aa, Synthetic construct
QTYTLDVLERCPHRP

SEQ ID NO: 1706 - protein, 15 aa, Synthetic construct
TYTLDVLERCPHRPI

SEQ ID NO: 1707 - protein, 15 aa, Synthetic construct
YTLDVLERCPHRPIL

SEQ ID NO: 1708 - protein, 15 aa, Synthetic construct
TLDVLERCPHRPILQ

SEQ ID NO: 1709 - protein, 15 aa, Synthetic construct
LDVLERCPHRPILQA

SEQ ID NO: 1710 - protein, 15 aa, Synthetic construct
DVLERCPHRPILQAG

SEQ ID NO: 1711 - protein, 15 aa, Synthetic construct
VLERCPHRPILQAGL

SEQ ID NO: 1712 - protein, 15 aa, Synthetic construct
LERCPHRPILQAGLP

SEQ ID NO: 1713 - protein, 15 aa, Synthetic construct
TEYKLVVVGAAGVGK

SEQ ID NO: 1714 - protein, 15 aa, Synthetic construct
EYKLVVVGAAGVGKS

SEQ ID NO: 1715 - protein, 15 aa, Synthetic construct
YKLVVVGAAGVGKSA

SEQ ID NO: 1716 - protein, 15 aa, Synthetic construct
KLVVVGAAGVGKSAL

SEQ ID NO: 1717 - protein, 15 aa, Synthetic construct
LVVVGAAGVGKSALT

SEQ ID NO: 1718 - protein, 15 aa, Synthetic construct
VVVGAAGVGKSALTI

SEQ ID NO: 1719 - protein, 15 aa, Synthetic construct
VVGAAGVGKSALTIQ

SEQ ID NO: 1720 - protein, 15 aa, Synthetic construct
VGAAGVGKSALTIQL

SEQ ID NO: 1721 - protein, 15 aa, Synthetic construct
TEYKLVVVGACGVGK

SEQ ID NO: 1722 - protein, 15 aa, Synthetic construct
EYKLVVVGACGVGKS

SEQ ID NO: 1723 - protein, 15 aa, Synthetic construct
YKLVVVGACGVGKSA

SEQ ID NO: 1724 - protein, 15 aa, Synthetic construct
KLVVVGACGVGKSAL

SEQ ID NO: 1725 - protein, 15 aa, Synthetic construct
LVVVGACGVGKSALT

SEQ ID NO: 1726 - protein, 15 aa, Synthetic construct
VVVGACGVGKSALTI

SEQ ID NO: 1727 - protein, 15 aa, Synthetic construct
VVGACGVGKSALTIQ

SEQ ID NO: 1728 - protein, 15 aa, Synthetic construct
VGACGVGKSALTIQL

SEQ ID NO: 1729 - protein, 5 aa, Synthetic construct
DGPHC

SEQ ID NO: 1730 - protein, 5 aa, Synthetic construct
GPHCV

SEQ ID NO: 1731 - protein, 5 aa, Synthetic construct
PHCVK

SEQ ID NO: 1732 - protein, 5 aa, Synthetic construct
HCVKT

SEQ ID NO: 1733 - protein, 5 aa, Synthetic construct
CVKTC

SEQ ID NO: 1734 - protein, 5 aa, Synthetic construct
VKTCP

SEQ ID NO: 1735 - protein, 5 aa, Synthetic construct
KTCPA

SEQ ID NO: 1736 - protein, 5 aa, Synthetic construct
TCPAV

SEQ ID NO: 1737 - protein, 5 aa, Synthetic construct
CPAVV

SEQ ID NO: 1738 - protein, 5 aa, Synthetic construct
PAVVM

SEQ ID NO: 1739 - protein, 5 aa, Synthetic construct
AVVMG

SEQ ID NO: 1740 - protein, 5 aa, Synthetic construct
VVMGE

SEQ ID NO: 1741 - protein, 5 aa, Synthetic construct
VMGEN

SEQ ID NO: 1742 - protein, 5 aa, Synthetic construct
MGENN

SEQ ID NO: 1743 - protein, 5 aa, Synthetic construct
GENNT

SEQ ID NO: 1744 - protein, 5 aa, Synthetic construct
IHTLY

SEQ ID NO: 1745 - protein, 5 aa, Synthetic construct
HTLYG

SEQ ID NO: 1746 - protein, 5 aa, Synthetic construct
TLYGH

SEQ ID NO: 1747 - protein, 5 aa, Synthetic construct
LYGHT

SEQ ID NO: 1748 - protein, 5 aa, Synthetic construct
YGHTS

SEQ ID NO: 1749 - protein, 5 aa, Synthetic construct
GHTST

SEQ ID NO: 1750 - protein, 5 aa, Synthetic construct
HTSTV

SEQ ID NO: 1751 - protein, 5 aa, Synthetic construct
TSTVC

SEQ ID NO: 1752 - protein, 5 aa, Synthetic construct
STVCC

SEQ ID NO: 1753 - protein, 5 aa, Synthetic construct
TVCCM

SEQ ID NO: 1754 - protein, 5 aa, Synthetic construct
VCCMH

SEQ ID NO: 1755 - protein, 5 aa, Synthetic construct
CCMHL

SEQ ID NO: 1756 - protein, 5 aa, Synthetic construct
CMHLH

SEQ ID NO: 1757 - protein, 5 aa, Synthetic construct
MHLHE

SEQ ID NO: 1758 - protein, 5 aa, Synthetic construct
HLHEK

SEQ ID NO: 1759 - protein, 5 aa, Synthetic construct
NHTYH

SEQ ID NO: 1760 - protein, 5 aa, Synthetic construct
HTYHL

SEQ ID NO: 1761 - protein, 5 aa, Synthetic construct
TYHLD

SEQ ID NO: 1762 - protein, 5 aa, Synthetic construct
YHLDV

SEQ ID NO: 1763 - protein, 5 aa, Synthetic construct
HLDVV

SEQ ID NO: 1764 - protein, 5 aa, Synthetic construct
LDVVE

SEQ ID NO: 1765 - protein, 5 aa, Synthetic construct
DVVER

SEQ ID NO: 1766 - protein, 5 aa, Synthetic construct
VVERW

SEQ ID NO: 1767 - protein, 5 aa, Synthetic construct
VERWP

SEQ ID NO: 1768 - protein, 5 aa, Synthetic construct
ERWPH

SEQ ID NO: 1769 - protein, 5 aa, Synthetic construct
RWPHR

SEQ ID NO: 1770 - protein, 5 aa, Synthetic construct
WPHRP

SEQ ID NO: 1771 - protein, 5 aa, Synthetic construct
PHRPI

SEQ ID NO: 1772 - protein, 5 aa, Synthetic construct
HRPIL

SEQ ID NO: 1773 - protein, 5 aa, Synthetic construct
RPILQ

SEQ ID NO: 1774 - protein, 5 aa, Synthetic construct
QSQHM

SEQ ID NO: 1775 - protein, 5 aa, Synthetic construct
SQHMT

SEQ ID NO: 1776 - protein, 5 aa, Synthetic construct
QHMTE

SEQ ID NO: 1777 - protein, 5 aa, Synthetic construct
HMTEV

SEQ ID NO: 1778 - protein, 5 aa, Synthetic construct
MTEVV

SEQ ID NO: 1779 - protein, 5 aa, Synthetic construct
TEVVR

SEQ ID NO: 1780 - protein, 5 aa, Synthetic construct
EVVRR

SEQ ID NO: 1781 - protein, 5 aa, Synthetic construct
VVRRY

SEQ ID NO: 1782 - protein, 5 aa, Synthetic construct
VRRYP

SEQ ID NO: 1783 - protein, 5 aa, Synthetic construct
RRYPH

SEQ ID NO: 1784 - protein, 5 aa, Synthetic construct
RYPHH

SEQ ID NO: 1785 - protein, 5 aa, Synthetic construct
YPHHE

SEQ ID NO: 1786 - protein, 5 aa, Synthetic construct
PHHER

SEQ ID NO: 1787 - protein, 5 aa, Synthetic construct
HHERC

SEQ ID NO: 1788 - protein, 5 aa, Synthetic construct
HERCS

SEQ ID NO: 1789 - skipped

SEQ ID NO: 1790 - protein, 5 aa, Synthetic construct
GPCKT

SEQ ID NO: 1791 - protein, 5 aa, Synthetic construct
PHVTC

SEQ ID NO: 1792 - protein, 5 aa, Synthetic construct
HCKCP

SEQ ID NO: 1793 - protein, 5 aa, Synthetic construct
CVTPA

SEQ ID NO: 1794 - protein, 5 aa, Synthetic construct
VKCAV

SEQ ID NO: 1795 - protein, 5 aa, Synthetic construct
KTPVV

SEQ ID NO: 1796 - protein, 5 aa, Synthetic construct
TCAVM

SEQ ID NO: 1797 - protein, 5 aa, Synthetic construct
CPVMG

SEQ ID NO: 1798 - protein, 5 aa, Synthetic construct
PAVGE

SEQ ID NO: 1799 - protein, 5 aa, Synthetic construct
AVMEN

SEQ ID NO: 1800 - protein, 5 aa, Synthetic construct
VVGNN

SEQ ID NO: 1801 - protein, 5 aa, Synthetic construct
VMENT

SEQ ID NO: 1802 - protein, 5 aa, Synthetic construct
MGNTL

SEQ ID NO: 1803 - protein, 5 aa, Synthetic construct
GENLV

SEQ ID NO: 1804 - protein, 5 aa, Synthetic construct
ENTVW

SEQ ID NO: 1805 - protein, 5 aa, Synthetic construct
HTYHT

SEQ ID NO: 1806 - protein, 5 aa, Synthetic construct
TLGTS

SEQ ID NO: 1807 - protein, 5 aa, Synthetic construct
LYHST

SEQ ID NO: 1808 - protein, 5 aa, Synthetic construct
YGTTV

SEQ ID NO: 1809 - protein, 5 aa, Synthetic construct
GHSVC

SEQ ID NO: 1810 - protein, 5 aa, Synthetic construct
HTTCC

SEQ ID NO: 1811 - protein, 5 aa, Synthetic construct
TSVCM

SEQ ID NO: 1812 - protein, 5 aa, Synthetic construct
STCMH

SEQ ID NO: 1813 - protein, 5 aa, Synthetic construct
TVCHL

SEQ ID NO: 1814 - protein, 5 aa, Synthetic construct
VCMLH

SEQ ID NO: 1815 - protein, 5 aa, Synthetic construct
CCHHE

SEQ ID NO: 1816 - protein, 5 aa, Synthetic construct
CMLEK

SEQ ID NO: 1817 - protein, 5 aa, Synthetic construct
MHHKR

SEQ ID NO: 1818 - protein, 5 aa, Synthetic construct
HLERV

SEQ ID NO: 1819 - protein, 5 aa, Synthetic construct
LHKVV

SEQ ID NO: 1820 - protein, 5 aa, Synthetic construct
HTHDV

SEQ ID NO: 1821 - protein, 5 aa, Synthetic construct
TYLVV

SEQ ID NO: 1822 - protein, 5 aa, Synthetic construct
YHDVE

SEQ ID NO: 1823 - protein, 5 aa, Synthetic construct
HLVER

SEQ ID NO: 1824 - protein, 5 aa, Synthetic construct
LDVRW

SEQ ID NO: 1825 - protein, 5 aa, Synthetic construct
DVEWP

SEQ ID NO: 1826 - protein, 5 aa, Synthetic construct
VVRPH

SEQ ID NO: 1827 - protein, 5 aa, Synthetic construct
VEWHR

SEQ ID NO: 1828 - protein, 5 aa, Synthetic construct
ERPRP

SEQ ID NO: 1829 - protein, 5 aa, Synthetic construct
RWHPI

SEQ ID NO: 1830 - protein, 5 aa, Synthetic construct
WPRIL

SEQ ID NO: 1831 - protein, 5 aa, Synthetic construct
PHPLQ

SEQ ID NO: 1832 - protein, 5 aa, Synthetic construct
HRIQA

SEQ ID NO: 1833 - protein, 5 aa, Synthetic construct
RPLAG

SEQ ID NO: 1834 - protein, 5 aa, Synthetic construct
PIQGL

SEQ ID NO: 1835 - protein, 5 aa, Synthetic construct
SQMEV

SEQ ID NO: 1836 - protein, 5 aa, Synthetic construct
QHTVV

SEQ ID NO: 1837 - protein, 5 aa, Synthetic construct
HMEVR

SEQ ID NO: 1838 - protein, 5 aa, Synthetic construct
MTVRR

SEQ ID NO: 1839 - protein, 5 aa, Synthetic construct
TEVRY

SEQ ID NO: 1840 - protein, 5 aa, Synthetic construct
EVRYP

SEQ ID NO: 1841 - protein, 5 aa, Synthetic construct
VVRPH

SEQ ID NO: 1842 - protein, 5 aa, Synthetic construct
VRYHH

SEQ ID NO: 1843 - protein, 5 aa, Synthetic construct
RRPHE

SEQ ID NO: 1844 - protein, 5 aa, Synthetic construct
RYHER

SEQ ID NO: 1845 - protein, 5 aa, Synthetic construct
YPHRC

SEQ ID NO: 1846 - protein, 5 aa, Synthetic construct
PHECS

SEQ ID NO: 1847 - protein, 5 aa, Synthetic construct
HHRSD

SEQ ID NO: 1848 - protein, 5 aa, Synthetic construct
HECDS

SEQ ID NO: 1849 - protein, 5 aa, Synthetic construct
ERSSD

SEQ ID NO: 1850 - protein, 9 aa, Synthetic construct
KTCPAVVMG

SEQ ID NO: 1851 - protein, 9 aa, Synthetic construct
TCPAVVMGE

SEQ ID NO: 1852 - protein, 9 aa, Synthetic construct
MTEVVRRYP

SEQ ID NO: 1853 - protein, 9 aa, Synthetic construct
EVVRRYPHH

SEQ ID NO: 1854 - protein, 9 aa, Synthetic construct
HLDVVERWP

SEQ ID NO: 1855 - protein, 9 aa, Synthetic construct
YGHTSTVCC

SEQ ID NO: 1856 - protein, 15 aa, Synthetic construct
GPHCVKTCPAVVMGE

SEQ ID NO: 1857 - protein, 15 aa, Synthetic construct
KTCPAVVMGENNTLV

SEQ ID NO: 1858 - protein, 15 aa, Synthetic construct
TCPAVVMGENNTLVW

SEQ ID NO: 1859 - protein, 15 aa, Synthetic construct
SQHMTEVVRRYPHHE

SEQ ID NO: 1860 - protein, 15 aa, Synthetic construct
QHMTEVVRRYPHHER

SEQ ID NO: 1861 - protein, 15 aa, Synthetic construct
EVVRRYPHHERCSDS

SEQ ID NO: 1862 - protein, 15 aa, Synthetic construct
HTYHLDVVERWPHRP

SEQ ID NO: 1863 - protein, 15 aa, Synthetic construct
HLDVVERWPHRPILQ

SEQ ID NO: 1864 - protein, 15 aa, Synthetic construct
HTLYGHTSTVCCMHL

SEQ ID NO: 1865 - protein, 15 aa, Synthetic construct
HTSTVCCMHLHEKRV

SEQ ID NO: 1866 - protein, 9 aa, Synthetic construct
KVGAVVMGR

SEQ ID NO: 1867 - protein, 9 aa, Synthetic construct
HAEAVVMGY

SEQ ID NO: 1868 - protein, 9 aa, Synthetic construct
KKFAVVMGD

SEQ ID NO: 1869 - protein, 9 aa, Synthetic construct
TTEPAVVMA

SEQ ID NO: 1870 - protein, 9 aa, Synthetic construct
ESEPAVVMF

SEQ ID NO: 1871 - protein, 9 aa, Synthetic construct
EADPAVVMM

SEQ ID NO: 1872 - protein, 9 aa, Synthetic construct
YARPAVVME

SEQ ID NO: 1873 - protein, 15 aa, Synthetic construct
KAVAVKTCPAVLEVV

SEQ ID NO: 1874 - protein, 15 aa, Synthetic construct
QGRYVKTCPAVAYHI

SEQ ID NO: 1875 - protein, 15 aa, Synthetic construct
AKYAVVMGENNRRPY

SEQ ID NO: 1876 - protein, 15 aa, Synthetic construct
PAVFVVMGENNRYAE

SEQ ID NO: 1877 - protein, 15 aa, Synthetic construct
EKRFVVMGENNLVEL

SEQ ID NO: 1878 - protein, 15 aa, Synthetic construct
LTQFVVMGENNALKL

SEQ ID NO: 1879 - protein, 5 aa, Synthetic construct
NLPFT

SEQ ID NO: 1880 - protein, 5 aa, Synthetic construct
PFTLT

SEQ ID NO: 1881 - protein, 5 aa, Synthetic construct
FTLTL

SEQ ID NO: 1882 - protein, 5 aa, Synthetic construct
TLTLA

SEQ ID NO: 1883 - protein, 5 aa, Synthetic construct
LTLAN

SEQ ID NO: 1884 - protein, 5 aa, Synthetic construct
TLANQ

SEQ ID NO: 1885 - protein, 5 aa, Synthetic construct
EVPEF

SEQ ID NO: 1886 - protein, 5 aa, Synthetic construct
VPEFL

SEQ ID NO: 1887 - protein, 5 aa, Synthetic construct
PEFLT

SEQ ID NO: 1888 - protein, 5 aa, Synthetic construct
EFLTE

SEQ ID NO: 1889 - protein, 5 aa, Synthetic construct
FLTEA

SEQ ID NO: 1890 - protein, 5 aa, Synthetic construct
TVMIC

SEQ ID NO: 1891 - protein, 5 aa, Synthetic construct
VMICG

SEQ ID NO: 1892 - protein, 5 aa, Synthetic construct
MICGE

SEQ ID NO: 1893 - protein, 5 aa, Synthetic construct
ICGEP

SEQ ID NO: 1894 - protein, 5 aa, Synthetic construct
CGEPY

SEQ ID NO: 1895 - protein, 5 aa, Synthetic construct
CHCKL

SEQ ID NO: 1896 - protein, 5 aa, Synthetic construct
HCKLM

SEQ ID NO: 1897 - protein, 5 aa, Synthetic construct
CKLME

SEQ ID NO: 1898 - protein, 5 aa, Synthetic construct
KLMER

SEQ ID NO: 1899 - protein, 5 aa, Synthetic construct
LMERW

SEQ ID NO: 1900 - protein, 5 aa, Synthetic construct
NLFLT

SEQ ID NO: 1901 - protein, 5 aa, Synthetic construct
LPTTL

SEQ ID NO: 1902 - protein, 5 aa, Synthetic construct
FTTAN

SEQ ID NO: 1903 - protein, 5 aa, Synthetic construct
TLLNQ

SEQ ID NO: 1904 - protein, 5 aa, Synthetic construct
LTAQR

SEQ ID NO: 1905 - protein, 5 aa, Synthetic construct
TLNRD

SEQ ID NO: 1906 - protein, 5 aa, Synthetic construct
FEVEF

SEQ ID NO: 1907 - protein, 5 aa, Synthetic construct
EEPFL

SEQ ID NO: 1908 - protein, 5 aa, Synthetic construct
VPFTE

SEQ ID NO: 1909 - protein, 5 aa, Synthetic construct
EFTAE

SEQ ID NO: 1910 - protein, 5 aa, Synthetic construct
FLEEK

SEQ ID NO: 1911 - protein, 5 aa, Synthetic construct
AVVIC

SEQ ID NO: 1912 - protein, 5 aa, Synthetic construct
VTMCG

SEQ ID NO: 1913 - protein, 5 aa, Synthetic construct
VMCEP

SEQ ID NO: 1914 - protein, 5 aa, Synthetic construct
ICEYT

SEQ ID NO: 1915 - protein, 5 aa, Synthetic construct
CGPTL

SEQ ID NO: 1916 - protein, 5 aa, Synthetic construct
CQHKL

SEQ ID NO: 1917 - protein, 5 aa, Synthetic construct
QCCLM

SEQ ID NO: 1918 - protein, 5 aa, Synthetic construct
HCLER

SEQ ID NO: 1919 - protein, 5 aa, Synthetic construct
KLEWM

SEQ ID NO: 1920 - protein, 5 aa, Synthetic construct
LMRMH

SEQ ID NO: 1921 - protein, 5 aa, Synthetic construct
ERMGL

SEQ ID NO: 1922 - protein, 5 aa, Synthetic construct
IIIGH

SEQ ID NO: 1923 - protein, 5 aa, Synthetic construct
IIGHH

SEQ ID NO: 1924 - protein, 5 aa, Synthetic construct
IGHHA

SEQ ID NO: 1925 - protein, 5 aa, Synthetic construct
GHHAY

SEQ ID NO: 1926 - protein, 5 aa, Synthetic construct
HHAYG

SEQ ID NO: 1927 - protein, 5 aa, Synthetic construct
KPIGH

SEQ ID NO: 1928 - protein, 5 aa, Synthetic construct
PIIHH

SEQ ID NO: 1929 - protein, 5 aa, Synthetic construct
IIHAY

SEQ ID NO: 1930 - protein, 5 aa, Synthetic construct
GHAGD

SEQ ID NO: 1931 - protein, 5 aa, Synthetic construct
HHYDQ

SEQ ID NO: 1932 - protein, 5 aa, Synthetic construct
NPCSD

SEQ ID NO: 1933 - protein, 5 aa, Synthetic construct
PCSDL

SEQ ID NO: 1934 - protein, 5 aa, Synthetic construct
CSDLI

SEQ ID NO: 1935 - protein, 5 aa, Synthetic construct
SDLIR

SEQ ID NO: 1936 - protein, 5 aa, Synthetic construct
IGCPD

SEQ ID NO: 1937 - protein, 5 aa, Synthetic construct
GCPDL

SEQ ID NO: 1938 - protein, 5 aa, Synthetic construct
CPDLI

SEQ ID NO: 1939 - protein, 5 aa, Synthetic construct
PDLIR

SEQ ID NO: 1940 - protein, 5 aa, Synthetic construct
ANPSD

SEQ ID NO: 1941 - protein, 5 aa, Synthetic construct
NNCDL

SEQ ID NO: 1942 - protein, 5 aa, Synthetic construct
NPSLI

SEQ ID NO: 1943 - protein, 5 aa, Synthetic construct
PCDIR

SEQ ID NO: 1944 - protein, 5 aa, Synthetic construct
CSLRD

SEQ ID NO: 1945 - protein, 5 aa, Synthetic construct
SDIDQ

SEQ ID NO: 1946 - protein, 5 aa, Synthetic construct
AYGPD

SEQ ID NO: 1947 - protein, 5 aa, Synthetic construct
YICDL

SEQ ID NO: 1948 - protein, 5 aa, Synthetic construct
IGPLI

SEQ ID NO: 1949 - protein, 5 aa, Synthetic construct
GCDIR

SEQ ID NO: 1950 - protein, 5 aa, Synthetic construct
CPLRD

SEQ ID NO: 1951 - protein, 5 aa, Synthetic construct
PDIDQ

SEQ ID NO: 1952 - protein, 9 aa, Synthetic construct
KQSQHMTEV

SEQ ID NO: 1953 - protein, 9 aa, Synthetic construct
QSQHMTEVV

SEQ ID NO: 1954 - protein, 9 aa, Synthetic construct
SQHMTEVVR

SEQ ID NO: 1955 - protein, 9 aa, Synthetic construct
QHMTEVVRR

SEQ ID NO: 1956 - protein, 9 aa, Synthetic construct
HMTEVVRRC

SEQ ID NO: 1957 - protein, 9 aa, Synthetic construct
MTEVVRRCP

SEQ ID NO: 1958 - protein, 9 aa, Synthetic construct
TEVVRRCPH

SEQ ID NO: 1959 - protein, 9 aa, Synthetic construct
EVVRRCPHH

SEQ ID NO: 1960 - protein, 9 aa, Synthetic construct
VVRRCPHHE

SEQ ID NO: 1961 - protein, 9 aa, Synthetic construct
VRRCPHHER

SEQ ID NO: 1962 - protein, 9 aa, Synthetic construct
RRCPHHERC

SEQ ID NO: 1963 - protein, 9 aa, Synthetic construct
RCPHHERCS

SEQ ID NO: 1964 - protein, 9 aa, Synthetic construct
CPHHERCSD

SEQ ID NO: 1965 - protein, 9 aa, Synthetic construct
PHHERCSDS

SEQ ID NO: 1966 - protein, 9 aa, Synthetic construct
HHERCSDSD

SEQ ID NO: 1967 - protein, 9 aa, Synthetic construct
KQSQHMTEV

SEQ ID NO: 1968 - protein, 9 aa, Synthetic construct
QSQHMTEVV

SEQ ID NO: 1969 - protein, 9 aa, Synthetic construct
SQHMTEVVR

SEQ ID NO: 1970 - protein, 9 aa, Synthetic construct
QHMTEVVRH

SEQ ID NO: 1971 - protein, 9 aa, Synthetic construct
HMTEVVRHC

SEQ ID NO: 1972 - protein, 9 aa, Synthetic construct
MTEVVRHCP

SEQ ID NO: 1973 - protein, 9 aa, Synthetic construct
TEVVRHCPH

SEQ ID NO: 1974 - protein, 9 aa, Synthetic construct
EVVRHCPHH

SEQ ID NO: 1975 - protein, 9 aa, Synthetic construct
VVRHCPHHE

SEQ ID NO: 1976 - protein, 9 aa, Synthetic construct
VRHCPHHER

SEQ ID NO: 1977 - protein, 9 aa, Synthetic construct
RHCPHHERC

SEQ ID NO: 1978 - protein, 9 aa, Synthetic construct
HCPHHERCS

SEQ ID NO: 1979 - protein, 9 aa, Synthetic construct
CPHHERCSD

SEQ ID NO: 1980 - protein, 9 aa, Synthetic construct
PHHERCSDS

SEQ ID NO: 1981 - protein, 9 aa, Synthetic construct
HHERCSDSD

SEQ ID NO: 1982 - protein, 5 aa, Synthetic construct
QHMTE

SEQ ID NO: 1983 - protein, 5 aa, Synthetic construct
HMTEV

SEQ ID NO: 1984 - protein, 5 aa, Synthetic construct
MTEVV

SEQ ID NO: 1985 - protein, 5 aa, Synthetic construct
TEVVR

SEQ ID NO: 1986 - protein, 5 aa, Synthetic construct
EVVRR

SEQ ID NO: 1987 - protein, 5 aa, Synthetic construct
VVRRC

SEQ ID NO: 1988 - protein, 5 aa, Synthetic construct
VRRCP

SEQ ID NO: 1989 - protein, 5 aa, Synthetic construct
RRCPH

SEQ ID NO: 1990 - protein, 5 aa, Synthetic construct
RCPHH

SEQ ID NO: 1991 - protein, 5 aa, Synthetic construct
CPHHE

SEQ ID NO: 1992 - protein, 5 aa, Synthetic construct
PHHER

SEQ ID NO: 1993 - protein, 5 aa, Synthetic construct
HHERC

SEQ ID NO: 1994 - protein, 5 aa, Synthetic construct
HERCS

SEQ ID NO: 1995 - protein, 5 aa, Synthetic construct
ERCSD

SEQ ID NO: 1996 - protein, 5 aa, Synthetic construct
RCSDS

SEQ ID NO: 1997 - protein, 5 aa, Synthetic construct
QHMTE

SEQ ID NO: 1998 - protein, 5 aa, Synthetic construct
HMTEV

SEQ ID NO: 1999 - protein, 5 aa, Synthetic construct
MTEVV

SEQ ID NO: 2000 - protein, 5 aa, Synthetic construct
TEVVR

SEQ ID NO: 2001 - protein, 5 aa, Synthetic construct
EVVRH

SEQ ID NO: 2002 - protein, 5 aa, Synthetic construct
VVRHC

SEQ ID NO: 2003 - protein, 5 aa, Synthetic construct
VRHCP

SEQ ID NO: 2004 - protein, 5 aa, Synthetic construct
RHCPH

SEQ ID NO: 2005 - protein, 5 aa, Synthetic construct
HCPHH

SEQ ID NO: 2006 - protein, 5 aa, Synthetic construct
CPHHE

SEQ ID NO: 2007 - protein, 5 aa, Synthetic construct
PHHER

SEQ ID NO: 2008 - protein, 5 aa, Synthetic construct
HHERC

SEQ ID NO: 2009 - protein, 5 aa, Synthetic construct
HERCS

SEQ ID NO: 2010 - protein, 5 aa, Synthetic construct
ERCSD

SEQ ID NO: 2011 - protein, 5 aa, Synthetic construct
RCSDS

SEQ ID NO: 2012 - protein, 9 aa, Synthetic construct
MTEYKLVVV

SEQ ID NO: 2013 - protein, 9 aa, Synthetic construct
TEYKLVVVG

SEQ ID NO: 2014 - protein, 9 aa, Synthetic construct
EYKLVVVGA

SEQ ID NO: 2015 - protein, 9 aa, Synthetic construct
YKLVVVGAG

SEQ ID NO: 2016 - protein, 9 aa, Synthetic construct
KLVVVGAGG

SEQ ID NO: 2017 - protein, 9 aa, Synthetic construct
LVVVGAGGV

SEQ ID NO: 2018 - protein, 9 aa, Synthetic construct
VVVGAGGVG

SEQ ID NO: 2019 - protein, 9 aa, Synthetic construct
VVGAGGVGK

SEQ ID NO: 2020 - protein, 9 aa, Synthetic construct
VGAGGVGKS

SEQ ID NO: 2021 - protein, 9 aa, Synthetic construct
GAGGVGKSA

SEQ ID NO: 2022 - protein, 9 aa, Synthetic construct
AGGVGKSAL

SEQ ID NO: 2023 - protein, 9 aa, Synthetic construct
GGVGKSALT

SEQ ID NO: 2024 - protein, 9 aa, Synthetic construct
GVGKSALTI

SEQ ID NO: 2025 - protein, 9 aa, Synthetic construct
VGKSALTIQ

SEQ ID NO: 2026 - protein, 9 aa, Synthetic construct
GKSALTIQL

SEQ ID NO: 2027 - protein, 9 aa, Synthetic construct
MTEYKLVVV

SEQ ID NO: 2028 - protein, 9 aa, Synthetic construct
TEYKLVVVG

SEQ ID NO: 2029 - protein, 9 aa, Synthetic construct
EYKLVVVGA

SEQ ID NO: 2030 - protein, 9 aa, Synthetic construct
YKLVVVGAD

SEQ ID NO: 2031 - protein, 9 aa, Synthetic construct
KLVVVGADG

SEQ ID NO: 2032 - protein, 9 aa, Synthetic construct
LVVVGADGV

SEQ ID NO: 2033 - protein, 9 aa, Synthetic construct
VVVGADGVG

SEQ ID NO: 2034 - protein, 9 aa, Synthetic construct
VVGADGVGK

SEQ ID NO: 2035 - protein, 9 aa, Synthetic construct
VGADGVGKS

SEQ ID NO: 2036 - protein, 9 aa, Synthetic construct
GADGVGKSA

SEQ ID NO: 2037 - protein, 9 aa, Synthetic construct
ADGVGKSAL

SEQ ID NO: 2038 - protein, 9 aa, Synthetic construct
DGVGKSALT

SEQ ID NO: 2039 - protein, 9 aa, Synthetic construct
GVGKSALTI

SEQ ID NO: 2040 - protein, 9 aa, Synthetic construct
VGKSALTIQ

SEQ ID NO: 2041 - protein, 9 aa, Synthetic construct
GKSALTIQL

SEQ ID NO: 2042 - protein, 5 aa, Synthetic construct
YKLVV

SEQ ID NO: 2043 - protein, 5 aa, Synthetic construct
KLVVV

SEQ ID NO: 2044 - protein, 5 aa, Synthetic construct
LVVVG

SEQ ID NO: 2045 - protein, 5 aa, Synthetic construct
VVVGA

SEQ ID NO: 2046 - protein, 5 aa, Synthetic construct
VVGAG

SEQ ID NO: 2047 - protein, 5 aa, Synthetic construct
VGAGG

SEQ ID NO: 2048 - protein, 5 aa, Synthetic construct
GAGGV

SEQ ID NO: 2049 - protein, 5 aa, Synthetic construct
AGGVG

SEQ ID NO: 2050 - protein, 5 aa, Synthetic construct
GGVGK

SEQ ID NO: 2051 - protein, 5 aa, Synthetic construct
GVGKS

SEQ ID NO: 2052 - protein, 5 aa, Synthetic construct
VGKSA

SEQ ID NO: 2053 - protein, 5 aa, Synthetic construct
GKSAL

SEQ ID NO: 2054 - protein, 5 aa, Synthetic construct
KSALT

SEQ ID NO: 2055 - protein, 5 aa, Synthetic construct
SALTI

SEQ ID NO: 2056 - protein, 5 aa, Synthetic construct
ALTIQ

SEQ ID NO: 2057 - protein, 5 aa, Synthetic construct
YKLVV

SEQ ID NO: 2058 - protein, 5 aa, Synthetic construct
KLVVV

SEQ ID NO: 2059 - protein, 5 aa, Synthetic construct
LVVVG

SEQ ID NO: 2060 - protein, 5 aa, Synthetic construct
VVVGA

SEQ ID NO: 2061 - protein, 5 aa, Synthetic construct
VVGAD

SEQ ID NO: 2062 - protein, 5 aa, Synthetic construct
VGADG

SEQ ID NO: 2063 - protein, 5 aa, Synthetic construct
GADGV

SEQ ID NO: 2064 - protein, 5 aa, Synthetic construct
ADGVG

SEQ ID NO: 2065 - protein, 5 aa, Synthetic construct
DGVGK

SEQ ID NO: 2066 - protein, 5 aa, Synthetic construct
GVGKS

SEQ ID NO: 2067 - protein, 5 aa, Synthetic construct
VGKSA

SEQ ID NO: 2068 - protein, 5 aa, Synthetic construct
GKSAL

SEQ ID NO: 2069 - protein, 5 aa, Synthetic construct
KSALT

SEQ ID NO: 2070 - protein, 5 aa, Synthetic construct
SALTI

SEQ ID NO: 2071 - protein, 5 aa, Synthetic construct
ALTIQ

SEQ ID NO: 2072-2079 - skipped (8 entries)

SEQ ID NO: 2080 - protein, 9 aa, Synthetic construct
MTEYKLVVV

SEQ ID NO: 2081 - protein, 9 aa, Synthetic construct
TEYKLVVVG

SEQ ID NO: 2082 - protein, 9 aa, Synthetic construct
EYKLVVVGA

SEQ ID NO: 2083 - protein, 9 aa, Synthetic construct
YKLVVVGAA

SEQ ID NO: 2084 - protein, 9 aa, Synthetic construct
KLVVVGAAG

SEQ ID NO: 2085 - protein, 9 aa, Synthetic construct
LVVVGAAGV

SEQ ID NO: 2086 - protein, 9 aa, Synthetic construct
VVVGAAGVG

SEQ ID NO: 2087 - protein, 9 aa, Synthetic construct
VVGAAGVGK

SEQ ID NO: 2088 - protein, 9 aa, Synthetic construct
VGAAGVGKS

SEQ ID NO: 2089 - protein, 9 aa, Synthetic construct
GAAGVGKSA

SEQ ID NO: 2090 - protein, 9 aa, Synthetic construct
AAGVGKSAL

SEQ ID NO: 2091 - protein, 9 aa, Synthetic construct
AGVGKSALT

SEQ ID NO: 2092 - protein, 9 aa, Synthetic construct
GVGKSALTI

SEQ ID NO: 2093 - protein, 9 aa, Synthetic construct
VGKSALTIQ

SEQ ID NO: 2094 - protein, 9 aa, Synthetic construct
GKSALTIQL

SEQ ID NO: 2095 - protein, 9 aa, Synthetic construct
MTEYKLVVV

SEQ ID NO: 2096 - protein, 9 aa, Synthetic construct
TEYKLVVVG

SEQ ID NO: 2097 - protein, 9 aa, Synthetic construct
EYKLVVVGA

SEQ ID NO: 2098 - protein, 9 aa, Synthetic construct
YKLVVVGAC

SEQ ID NO: 2099 - protein, 9 aa, Synthetic construct
KLVVVGACG

SEQ ID NO: 2100 - protein, 9 aa, Synthetic construct
LVVVGACGV

SEQ ID NO: 2101 - protein, 9 aa, Synthetic construct
VVVGACGVG

SEQ ID NO: 2102 - protein, 9 aa, Synthetic construct
VVGACGVGK

SEQ ID NO: 2103 - protein, 9 aa, Synthetic construct
VGACGVGKS

SEQ ID NO: 2104 - protein, 9 aa, Synthetic construct
GACGVGKSA

SEQ ID NO: 2105 - protein, 9 aa, Synthetic construct
ACGVGKSAL

SEQ ID NO: 2106 - protein, 9 aa, Synthetic construct
CGVGKSALT

SEQ ID NO: 2107 - protein, 9 aa, Synthetic construct
GVGKSALTI

SEQ ID NO: 2108 - protein, 9 aa, Synthetic construct
VGKSALTIQ

SEQ ID NO: 2109 - protein, 9 aa, Synthetic construct
GKSALTIQL

SEQ ID NO: 2110 - protein, 9 aa, Synthetic construct
MTEYKLVVV

SEQ ID NO: 2111 - protein, 9 aa, Synthetic construct
TEYKLVVVG

SEQ ID NO: 2112 - protein, 9 aa, Synthetic construct
EYKLVVVGA

SEQ ID NO: 2113 - protein, 9 aa, Synthetic construct
YKLVVVGAD

SEQ ID NO: 2114 - protein, 9 aa, Synthetic construct
KLVVVGADG

SEQ ID NO: 2115 - protein, 9 aa, Synthetic construct
LVVVGADGV

SEQ ID NO: 2116 - protein, 9 aa, Synthetic construct
VVVGADGVG

SEQ ID NO: 2117 - protein, 9 aa, Synthetic construct
VVGADGVGK

SEQ ID NO: 2118 - protein, 9 aa, Synthetic construct
VGADGVGKS

SEQ ID NO: 2119 - protein, 9 aa, Synthetic construct
GADGVGKSA

SEQ ID NO: 2120 - protein, 9 aa, Synthetic construct
ADGVGKSAL

SEQ ID NO: 2121 - protein, 9 aa, Synthetic construct
DGVGKSALT

SEQ ID NO: 2122 - protein, 9 aa, Synthetic construct
GVGKSALTI

SEQ ID NO: 2123 - protein, 9 aa, Synthetic construct
VGKSALTIQ

SEQ ID NO: 2124 - protein, 9 aa, Synthetic construct
GKSALTIQL

SEQ ID NO: 2125 - protein, 9 aa, Synthetic construct
MTEYKLVVV

SEQ ID NO: 2126 - protein, 9 aa, Synthetic construct
TEYKLVVVG

SEQ ID NO: 2127 - protein, 9 aa, Synthetic construct
EYKLVVVGA

SEQ ID NO: 2128 - protein, 9 aa, Synthetic construct
YKLVVVGAR

SEQ ID NO: 2129 - protein, 9 aa, Synthetic construct
KLVVVGARG

SEQ ID NO: 2130 - protein, 9 aa, Synthetic construct
LVVVGARGV

SEQ ID NO: 2131 - protein, 9 aa, Synthetic construct
VVVGARGVG

SEQ ID NO: 2132 - protein, 9 aa, Synthetic construct
VVGARGVGK

SEQ ID NO: 2133 - protein, 9 aa, Synthetic construct
VGARGVGKS

SEQ ID NO: 2134 - protein, 9 aa, Synthetic construct
GARGVGKSA

SEQ ID NO: 2135 - protein, 9 aa, Synthetic construct
ARGVGKSAL

SEQ ID NO: 2136 - protein, 9 aa, Synthetic construct
RGVGKSALT

SEQ ID NO: 2137 - protein, 9 aa, Synthetic construct
GVGKSALTI

SEQ ID NO: 2138 - protein, 9 aa, Synthetic construct
VGKSALTIQ

SEQ ID NO: 2139 - protein, 9 aa, Synthetic construct
GKSALTIQL

SEQ ID NO: 2140 - protein, 9 aa, Synthetic construct
MTEYKLVVV

SEQ ID NO: 2141 - protein, 9 aa, Synthetic construct
TEYKLVVVG

SEQ ID NO: 2142 - protein, 9 aa, Synthetic construct
EYKLVVVGA

SEQ ID NO: 2143 - protein, 9 aa, Synthetic construct
YKLVVVGAS

SEQ ID NO: 2144 - protein, 9 aa, Synthetic construct
KLVVVGASG

SEQ ID NO: 2145 - protein, 9 aa, Synthetic construct
LVVVGASGV

SEQ ID NO: 2146 - protein, 9 aa, Synthetic construct
VVVGASGVG

SEQ ID NO: 2147 - protein, 9 aa, Synthetic construct
VVGASGVGK

SEQ ID NO: 2148 - protein, 9 aa, Synthetic construct
VGASGVGKS

SEQ ID NO: 2149 - protein, 9 aa, Synthetic construct
GASGVGKSA

SEQ ID NO: 2150 - protein, 9 aa, Synthetic construct
ASGVGKSAL

SEQ ID NO: 2151 - protein, 9 aa, Synthetic construct
SGVGKSALT

SEQ ID NO: 2152 - protein, 9 aa, Synthetic construct
GVGKSALTI

SEQ ID NO: 2153 - protein, 9 aa, Synthetic construct
VGKSALTIQ

SEQ ID NO: 2154 - protein, 9 aa, Synthetic construct
GKSALTIQL

SEQ ID NO: 2155 - protein, 9 aa, Synthetic construct
MTEYKLVVV

SEQ ID NO: 2156 - protein, 9 aa, Synthetic construct
TEYKLVVVG

SEQ ID NO: 2157 - protein, 9 aa, Synthetic construct
EYKLVVVGA

SEQ ID NO: 2158 - protein, 9 aa, Synthetic construct
YKLVVVGAV

SEQ ID NO: 2159 - protein, 9 aa, Synthetic construct
KLVVVGAVG

SEQ ID NO: 2160 - protein, 9 aa, Synthetic construct
LVVVGAVGV

SEQ ID NO: 2161 - protein, 9 aa, Synthetic construct
VVVGAVGVG

SEQ ID NO: 2162 - protein, 9 aa, Synthetic construct
VVGAVGVGK

SEQ ID NO: 2163 - protein, 9 aa, Synthetic construct
VGAVGVGKS

SEQ ID NO: 2164 - protein, 9 aa, Synthetic construct
GAVGVGKSA

SEQ ID NO: 2165 - protein, 9 aa, Synthetic construct
AVGVGKSAL

SEQ ID NO: 2166 - protein, 9 aa, Synthetic construct
VGVGKSALT

SEQ ID NO: 2167 - protein, 9 aa, Synthetic construct
GVGKSALTI

SEQ ID NO: 2168 - protein, 9 aa, Synthetic construct
VGKSALTIQ

SEQ ID NO: 2169 - protein, 9 aa, Synthetic construct
GKSALTIQL

SEQ ID NO: 2170 - protein, 9 aa, Synthetic construct
MTEYKLVVV

SEQ ID NO: 2171 - protein, 9 aa, Synthetic construct
TEYKLVVVG

SEQ ID NO: 2172 - protein, 9 aa, Synthetic construct
EYKLVVVGA

SEQ ID NO: 2173 - protein, 9 aa, Synthetic construct
YKLVVVGAG

SEQ ID NO: 2174 - protein, 9 aa, Synthetic construct
KLVVVGAGC

SEQ ID NO: 2175 - protein, 9 aa, Synthetic construct
LVVVGAGCV

SEQ ID NO: 2176 - protein, 9 aa, Synthetic construct
VVVGAGCVG

SEQ ID NO: 2177 - protein, 9 aa, Synthetic construct
VVGAGCVGK

SEQ ID NO: 2178 - protein, 9 aa, Synthetic construct
VGAGCVGKS

SEQ ID NO: 2179 - protein, 9 aa, Synthetic construct
GAGCVGKSA

SEQ ID NO: 2180 - protein, 9 aa, Synthetic construct
AGCVGKSAL

SEQ ID NO: 2181 - protein, 9 aa, Synthetic construct
GCVGKSALT

SEQ ID NO: 2182 - protein, 9 aa, Synthetic construct
CVGKSALTI

SEQ ID NO: 2183 - protein, 9 aa, Synthetic construct
VGKSALTIQ

SEQ ID NO: 2184 - protein, 9 aa, Synthetic construct
GKSALTIQL

SEQ ID NO: 2185 - protein, 9 aa, Synthetic construct
KSALTIQLI

SEQ ID NO: 2186 - protein, 9 aa, Synthetic construct
MTEYKLVVV

SEQ ID NO: 2187 - protein, 9 aa, Synthetic construct
TEYKLVVVG

SEQ ID NO: 2188 - protein, 9 aa, Synthetic construct
EYKLVVVGA

SEQ ID NO: 2189 - protein, 9 aa, Synthetic construct
YKLVVVGAG

SEQ ID NO: 2190 - protein, 9 aa, Synthetic construct
KLVVVGAGD

SEQ ID NO: 2191 - protein, 9 aa, Synthetic construct
LVVVGAGDV

SEQ ID NO: 2192 - protein, 9 aa, Synthetic construct
VVVGAGDVG

SEQ ID NO: 2193 - protein, 9 aa, Synthetic construct
VVGAGDVGK

SEQ ID NO: 2194 - protein, 9 aa, Synthetic construct
VGAGDVGKS

SEQ ID NO: 2195 - protein, 9 aa, Synthetic construct
GAGDVGKSA

SEQ ID NO: 2196 - protein, 9 aa, Synthetic construct
AGDVGKSAL

SEQ ID NO: 2197 - protein, 9 aa, Synthetic construct
GDVGKSALT

SEQ ID NO: 2198 - protein, 9 aa, Synthetic construct
DVGKSALTI

SEQ ID NO: 2199 - protein, 9 aa, Synthetic construct
VGKSALTIQ

SEQ ID NO: 2200 - protein, 9 aa, Synthetic construct
GKSALTIQL

SEQ ID NO: 2201 - protein, 9 aa, Synthetic construct
KSALTIQLI

SEQ ID NO: 2202 - protein, 9 aa, Synthetic construct
MTEYKLVVV

SEQ ID NO: 2203 - protein, 9 aa, Synthetic construct
TEYKLVVVG

SEQ ID NO: 2204 - protein, 9 aa, Synthetic construct
EYKLVVVGA

SEQ ID NO: 2205 - protein, 9 aa, Synthetic construct
YKLVVVGAG

SEQ ID NO: 2206 - protein, 9 aa, Synthetic construct
KLVVVGAGR

SEQ ID NO: 2207 - protein, 9 aa, Synthetic construct
LVVVGAGRV

SEQ ID NO: 2208 - protein, 9 aa, Synthetic construct
VVVGAGRVG

SEQ ID NO: 2209 - protein, 9 aa, Synthetic construct
VVGAGRVGK

SEQ ID NO: 2210 - protein, 9 aa, Synthetic construct
VGAGRVGKS

SEQ ID NO: 2211 - protein, 9 aa, Synthetic construct
GAGRVGKSA

SEQ ID NO: 2212 - protein, 9 aa, Synthetic construct
AGRVGKSAL

SEQ ID NO: 2213 - protein, 9 aa, Synthetic construct
GRVGKSALT

SEQ ID NO: 2214 - protein, 9 aa, Synthetic construct
RVGKSALTI

SEQ ID NO: 2215 - protein, 9 aa, Synthetic construct
VGKSALTIQ

SEQ ID NO: 2216 - protein, 9 aa, Synthetic construct
GKSALTIQL

SEQ ID NO: 2217 - protein, 9 aa, Synthetic construct
KSALTIQLI

SEQ ID NO: 2218 - protein, 9 aa, Synthetic construct
MTEYKLVVV

SEQ ID NO: 2219 - protein, 9 aa, Synthetic construct
TEYKLVVVG

SEQ ID NO: 2220 - protein, 9 aa, Synthetic construct
EYKLVVVGA

SEQ ID NO: 2221 - protein, 9 aa, Synthetic construct
YKLVVVGAG

SEQ ID NO: 2222 - protein, 9 aa, Synthetic construct
KLVVVGAGV

SEQ ID NO: 2223 - protein, 9 aa, Synthetic construct
LVVVGAGVV

SEQ ID NO: 2224 - protein, 9 aa, Synthetic construct
VVVGAGVVG

SEQ ID NO: 2225 - protein, 9 aa, Synthetic construct
VVGAGVVGK

SEQ ID NO: 2226 - protein, 9 aa, Synthetic construct
VGAGVVGKS

SEQ ID NO: 2227 - protein, 9 aa, Synthetic construct
GAGVVGKSA

SEQ ID NO: 2228 - protein, 9 aa, Synthetic construct
AGVVGKSAL

SEQ ID NO: 2229 - protein, 9 aa, Synthetic construct
GVVGKSALT

SEQ ID NO: 2230 - protein, 9 aa, Synthetic construct
VVGKSALTI

SEQ ID NO: 2231 - protein, 9 aa, Synthetic construct
VGKSALTIQ

SEQ ID NO: 2232 - protein, 9 aa, Synthetic construct
GKSALTIQL

SEQ ID NO: 2233 - protein, 9 aa, Synthetic construct
KSALTIQLI

SEQ ID NO: 2234 - protein, 9 aa, Synthetic construct
DGETCLLDI

SEQ ID NO: 2235 - protein, 9 aa, Synthetic construct
GETCLLDIL

SEQ ID NO: 2236 - protein, 9 aa, Synthetic construct
ETCLLDILD

SEQ ID NO: 2237 - protein, 9 aa, Synthetic construct
TCLLDILDT

SEQ ID NO: 2238 - protein, 9 aa, Synthetic construct
CLLDILDTA

SEQ ID NO: 2239 - protein, 9 aa, Synthetic construct
LLDILDTAG

SEQ ID NO: 2240 - protein, 9 aa, Synthetic construct
LDILDTAGE

SEQ ID NO: 2241 - protein, 9 aa, Synthetic construct
DILDTAGEE

SEQ ID NO: 2242 - protein, 9 aa, Synthetic construct
ILDTAGEEE

SEQ ID NO: 2243 - protein, 9 aa, Synthetic construct
LDTAGEEEY

SEQ ID NO: 2244 - protein, 9 aa, Synthetic construct
DTAGEEEYS

SEQ ID NO: 2245 - protein, 9 aa, Synthetic construct
TAGEEEYSA

SEQ ID NO: 2246 - protein, 9 aa, Synthetic construct
AGEEEYSAM

SEQ ID NO: 2247 - protein, 9 aa, Synthetic construct
GEEEYSAMR

SEQ ID NO: 2248 - protein, 9 aa, Synthetic construct
EEEYSAMRD

SEQ ID NO: 2249 - protein, 9 aa, Synthetic construct
EEYSAMRDQ

SEQ ID NO: 2250 - protein, 9 aa, Synthetic construct
EYSAMRDQY

SEQ ID NO: 2251 - protein, 9 aa, Synthetic construct
YSAMRDQYM

SEQ ID NO: 2252 - protein, 9 aa, Synthetic construct
DGETCLLDI

SEQ ID NO: 2253 - protein, 9 aa, Synthetic construct
GETCLLDIL

SEQ ID NO: 2254 - protein, 9 aa, Synthetic construct
ETCLLDILD

SEQ ID NO: 2255 - protein, 9 aa, Synthetic construct
TCLLDILDT

SEQ ID NO: 2256 - protein, 9 aa, Synthetic construct
CLLDILDTA

SEQ ID NO: 2257 - protein, 9 aa, Synthetic construct
LLDILDTAG

SEQ ID NO: 2258 - protein, 9 aa, Synthetic construct
LDILDTAGH

SEQ ID NO: 2259 - protein, 9 aa, Synthetic construct
DILDTAGHE

SEQ ID NO: 2260 - protein, 9 aa, Synthetic construct
ILDTAGHEE

SEQ ID NO: 2261 - protein, 9 aa, Synthetic construct
LDTAGHEEY

SEQ ID NO: 2262 - protein, 9 aa, Synthetic construct
DTAGHEEYS

SEQ ID NO: 2263 - protein, 9 aa, Synthetic construct
TAGHEEYSA

SEQ ID NO: 2264 - protein, 9 aa, Synthetic construct
AGHEEYSAM

SEQ ID NO: 2265 - protein, 9 aa, Synthetic construct
GHEEYSAMR

SEQ ID NO: 2266 - protein, 9 aa, Synthetic construct
HEEYSAMRD

SEQ ID NO: 2267 - protein, 9 aa, Synthetic construct
EEYSAMRDQ

SEQ ID NO: 2268 - protein, 9 aa, Synthetic construct
EYSAMRDQY

SEQ ID NO: 2269 - protein, 9 aa, Synthetic construct
YSAMRDQYM

SEQ ID NO: 2270 - protein, 9 aa, Synthetic construct
DGETCLLDI

SEQ ID NO: 2271 - protein, 9 aa, Synthetic construct
GETCLLDIL

SEQ ID NO: 2272 - protein, 9 aa, Synthetic construct
ETCLLDILD

SEQ ID NO: 2273 - protein, 9 aa, Synthetic construct
TCLLDILDT

SEQ ID NO: 2274 - protein, 9 aa, Synthetic construct
CLLDILDTA

SEQ ID NO: 2275 - protein, 9 aa, Synthetic construct
LLDILDTAG

SEQ ID NO: 2276 - protein, 9 aa, Synthetic construct
LDILDTAGK

SEQ ID NO: 2277 - protein, 9 aa, Synthetic construct
DILDTAGKE

SEQ ID NO: 2278 - protein, 9 aa, Synthetic construct
ILDTAGKEE

SEQ ID NO: 2279 - protein, 9 aa, Synthetic construct
LDTAGKEEY

SEQ ID NO: 2280 - protein, 9 aa, Synthetic construct
DTAGKEEYS

SEQ ID NO: 2281 - protein, 9 aa, Synthetic construct
TAGKEEYSA

SEQ ID NO: 2282 - protein, 9 aa, Synthetic construct
AGKEEYSAM

SEQ ID NO: 2283 - protein, 9 aa, Synthetic construct
GKEEYSAMR

SEQ ID NO: 2284 - protein, 9 aa, Synthetic construct
KEEYSAMRD

SEQ ID NO: 2285 - protein, 9 aa, Synthetic construct
EEYSAMRDQ

SEQ ID NO: 2286 - protein, 9 aa, Synthetic construct
EYSAMRDQY

SEQ ID NO: 2287 - protein, 9 aa, Synthetic construct
YSAMRDQYM

SEQ ID NO: 2288 - protein, 9 aa, Synthetic construct
DGETCLLDI

SEQ ID NO: 2289 - protein, 9 aa, Synthetic construct
GETCLLDIL

SEQ ID NO: 2290 - protein, 9 aa, Synthetic construct
ETCLLDILD

SEQ ID NO: 2291 - protein, 9 aa, Synthetic construct
TCLLDILDT

SEQ ID NO: 2292 - protein, 9 aa, Synthetic construct
CLLDILDTA

SEQ ID NO: 2293 - protein, 9 aa, Synthetic construct
LLDILDTAG

SEQ ID NO: 2294 - protein, 9 aa, Synthetic construct
LDILDTAGL

SEQ ID NO: 2295 - protein, 9 aa, Synthetic construct
DILDTAGLE

SEQ ID NO: 2296 - protein, 9 aa, Synthetic construct
ILDTAGLEE

SEQ ID NO: 2297 - protein, 9 aa, Synthetic construct
LDTAGLEEY

SEQ ID NO: 2298 - protein, 9 aa, Synthetic construct
DTAGLEEYS

SEQ ID NO: 2299 - protein, 9 aa, Synthetic construct
TAGLEEYSA

SEQ ID NO: 2300 - protein, 9 aa, Synthetic construct
AGLEEYSAM

SEQ ID NO: 2301 - protein, 9 aa, Synthetic construct
GLEEYSAMR

SEQ ID NO: 2302 - protein, 9 aa, Synthetic construct
LEEYSAMRD

SEQ ID NO: 2303 - protein, 9 aa, Synthetic construct
EEYSAMRDQ

SEQ ID NO: 2304 - protein, 9 aa, Synthetic construct
EYSAMRDQY

SEQ ID NO: 2305 - protein, 9 aa, Synthetic construct
YSAMRDQYM

SEQ ID NO: 2306 - protein, 9 aa, Synthetic construct
DGETCLLDI

SEQ ID NO: 2307 - protein, 9 aa, Synthetic construct
GETCLLDIL

SEQ ID NO: 2308 - protein, 9 aa, Synthetic construct
ETCLLDILD

SEQ ID NO: 2309 - protein, 9 aa, Synthetic construct
TCLLDILDT

SEQ ID NO: 2310 - protein, 9 aa, Synthetic construct
CLLDILDTA

SEQ ID NO: 2311 - protein, 9 aa, Synthetic construct
LLDILDTAG

SEQ ID NO: 2312 - protein, 9 aa, Synthetic construct
LDILDTAGP

SEQ ID NO: 2313 - protein, 9 aa, Synthetic construct
DILDTAGPE

SEQ ID NO: 2314 - protein, 9 aa, Synthetic construct
ILDTAGPEE

SEQ ID NO: 2315 - protein, 9 aa, Synthetic construct
LDTAGPEEY

SEQ ID NO: 2316 - protein, 9 aa, Synthetic construct
DTAGPEEYS

SEQ ID NO: 2317 - protein, 9 aa, Synthetic construct
TAGPEEYSA

SEQ ID NO: 2318 - protein, 9 aa, Synthetic construct
AGPEEYSAM

SEQ ID NO: 2319 - protein, 9 aa, Synthetic construct
GPEEYSAMR

SEQ ID NO: 2320 - protein, 9 aa, Synthetic construct
PEEYSAMRD

SEQ ID NO: 2321 - protein, 9 aa, Synthetic construct
EEYSAMRDQ

SEQ ID NO: 2322 - protein, 9 aa, Synthetic construct
EYSAMRDQY

SEQ ID NO: 2323 - protein, 9 aa, Synthetic construct
YSAMRDQYM

SEQ ID NO: 2324 - protein, 9 aa, Synthetic construct
DGETCLLDI

SEQ ID NO: 2325 - protein, 9 aa, Synthetic construct
GETCLLDIL

SEQ ID NO: 2326 - protein, 9 aa, Synthetic construct
ETCLLDILD

SEQ ID NO: 2327 - protein, 9 aa, Synthetic construct
TCLLDILDT

SEQ ID NO: 2328 - protein, 9 aa, Synthetic construct
CLLDILDTA

SEQ ID NO: 2329 - protein, 9 aa, Synthetic construct
LLDILDTAG

SEQ ID NO: 2330 - protein, 9 aa, Synthetic construct
LDILDTAGR

SEQ ID NO: 2331 - protein, 9 aa, Synthetic construct
DILDTAGRE

SEQ ID NO: 2332 - protein, 9 aa, Synthetic construct
ILDTAGREE

SEQ ID NO: 2333 - protein, 9 aa, Synthetic construct
LDTAGREEY

SEQ ID NO: 2334 - protein, 9 aa, Synthetic construct
DTAGREEYS

SEQ ID NO: 2335 - protein, 9 aa, Synthetic construct
TAGREEYSA

SEQ ID NO: 2336 - protein, 9 aa, Synthetic construct
AGREEYSAM

SEQ ID NO: 2337 - protein, 9 aa, Synthetic construct
GREEYSAMR

SEQ ID NO: 2338 - protein, 9 aa, Synthetic construct
REEYSAMRD

SEQ ID NO: 2339 - protein, 9 aa, Synthetic construct
EEYSAMRDQ

SEQ ID NO: 2340 - protein, 9 aa, Synthetic construct
EYSAMRDQY

SEQ ID NO: 2341 - protein, 9 aa, Synthetic construct
YSAMRDQYM

SEQ ID NO: 2342 - protein, 15 aa, Synthetic construct
MTEYKLVVVGAAGVG

SEQ ID NO: 2343 - protein, 15 aa, Synthetic construct
TEYKLVVVGAAGVGK

SEQ ID NO: 2344 - protein, 15 aa, Synthetic construct
EYKLVVVGAAGVGKS

SEQ ID NO: 2345 - protein, 15 aa, Synthetic construct
YKLVVVGAAGVGKSA

SEQ ID NO: 2346 - protein, 15 aa, Synthetic construct
KLVVVGAAGVGKSAL

SEQ ID NO: 2347 - protein, 15 aa, Synthetic construct
LVVVGAAGVGKSALT

SEQ ID NO: 2348 - protein, 15 aa, Synthetic construct
VVVGAAGVGKSALTI

SEQ ID NO: 2349 - protein, 15 aa, Synthetic construct
VVGAAGVGKSALTIQ

SEQ ID NO: 2350 - protein, 15 aa, Synthetic construct
VGAAGVGKSALTIQL

SEQ ID NO: 2351 - protein, 15 aa, Synthetic construct
GAAGVGKSALTIQLI

SEQ ID NO: 2352 - protein, 15 aa, Synthetic construct
AAGVGKSALTIQLIQ

SEQ ID NO: 2353 - protein, 15 aa, Synthetic construct
AGVGKSALTIQLIQN

SEQ ID NO: 2354 - protein, 15 aa, Synthetic construct
GVGKSALTIQLIQNH

SEQ ID NO: 2355 - protein, 15 aa, Synthetic construct
VGKSALTIQLIQNHF

SEQ ID NO: 2356 - protein, 15 aa, Synthetic construct
GKSALTIQLIQNHFV

SEQ ID NO: 2357 - protein, 15 aa, Synthetic construct
MTEYKLVVVGACGVG

SEQ ID NO: 2358 - protein, 15 aa, Synthetic construct
TEYKLVVVGACGVGK

SEQ ID NO: 2359 - protein, 15 aa, Synthetic construct
EYKLVVVGACGVGKS

SEQ ID NO: 2360 - protein, 15 aa, Synthetic construct
YKLVVVGACGVGKSA

SEQ ID NO: 2361 - protein, 15 aa, Synthetic construct
KLVVVGACGVGKSAL

SEQ ID NO: 2362 - protein, 15 aa, Synthetic construct
LVVVGACGVGKSALT

SEQ ID NO: 2363 - protein, 15 aa, Synthetic construct
VVVGACGVGKSALTI

SEQ ID NO: 2364 - protein, 15 aa, Synthetic construct
VVGACGVGKSALTIQ

SEQ ID NO: 2365 - protein, 15 aa, Synthetic construct
VGACGVGKSALTIQL

SEQ ID NO: 2366 - protein, 15 aa, Synthetic construct
GACGVGKSALTIQLI

SEQ ID NO: 2367 - protein, 15 aa, Synthetic construct
ACGVGKSALTIQLIQ

SEQ ID NO: 2368 - protein, 15 aa, Synthetic construct
CGVGKSALTIQLIQN

SEQ ID NO: 2369 - protein, 15 aa, Synthetic construct
GVGKSALTIQLIQNH

SEQ ID NO: 2370 - protein, 15 aa, Synthetic construct
VGKSALTIQLIQNHF

SEQ ID NO: 2371 - protein, 15 aa, Synthetic construct
GKSALTIQLIQNHFV

SEQ ID NO: 2372 - protein, 15 aa, Synthetic construct
MTEYKLVVVGADGVG

SEQ ID NO: 2373 - protein, 15 aa, Synthetic construct
TEYKLVVVGADGVGK

SEQ ID NO: 2374 - protein, 15 aa, Synthetic construct
EYKLVVVGADGVGKS

SEQ ID NO: 2375 - protein, 15 aa, Synthetic construct
YKLVVVGADGVGKSA

SEQ ID NO: 2376 - protein, 15 aa, Synthetic construct
KLVVVGADGVGKSAL

SEQ ID NO: 2377 - protein, 15 aa, Synthetic construct
LVVVGADGVGKSALT

SEQ ID NO: 2378 - protein, 15 aa, Synthetic construct
VVVGADGVGKSALTI

SEQ ID NO: 2379 - protein, 15 aa, Synthetic construct
VVGADGVGKSALTIQ

SEQ ID NO: 2380 - protein, 15 aa, Synthetic construct
VGADGVGKSALTIQL

SEQ ID NO: 2381 - protein, 15 aa, Synthetic construct
GADGVGKSALTIQLI

SEQ ID NO: 2382 - protein, 15 aa, Synthetic construct
ADGVGKSALTIQLIQ

SEQ ID NO: 2383 - protein, 15 aa, Synthetic construct
DGVGKSALTIQLIQN

SEQ ID NO: 2384 - protein, 15 aa, Synthetic construct
GVGKSALTIQLIQNH

SEQ ID NO: 2385 - protein, 15 aa, Synthetic construct
VGKSALTIQLIQNHF

SEQ ID NO: 2386 - protein, 15 aa, Synthetic construct
GKSALTIQLIQNHFV

SEQ ID NO: 2387 - protein, 15 aa, Synthetic construct
MTEYKLVVVGARGVG

SEQ ID NO: 2388 - protein, 15 aa, Synthetic construct
TEYKLVVVGARGVGK

SEQ ID NO: 2389 - protein, 15 aa, Synthetic construct
EYKLVVVGARGVGKS

SEQ ID NO: 2390 - protein, 15 aa, Synthetic construct
YKLVVVGARGVGKSA

SEQ ID NO: 2391 - protein, 15 aa, Synthetic construct
KLVVVGARGVGKSAL

SEQ ID NO: 2392 - protein, 15 aa, Synthetic construct
LVVVGARGVGKSALT

SEQ ID NO: 2393 - protein, 15 aa, Synthetic construct
VVVGARGVGKSALTI

SEQ ID NO: 2394 - protein, 15 aa, Synthetic construct
VVGARGVGKSALTIQ

SEQ ID NO: 2395 - protein, 15 aa, Synthetic construct
VGARGVGKSALTIQL

SEQ ID NO: 2396 - protein, 15 aa, Synthetic construct
GARGVGKSALTIQLI

SEQ ID NO: 2397 - protein, 15 aa, Synthetic construct
ARGVGKSALTIQLIQ

SEQ ID NO: 2398 - protein, 15 aa, Synthetic construct
RGVGKSALTIQLIQN

SEQ ID NO: 2399 - protein, 15 aa, Synthetic construct
GVGKSALTIQLIQNH

SEQ ID NO: 2400 - protein, 15 aa, Synthetic construct
VGKSALTIQLIQNHF

SEQ ID NO: 2401 - protein, 15 aa, Synthetic construct
GKSALTIQLIQNHFV

SEQ ID NO: 2402 - protein, 15 aa, Synthetic construct
MTEYKLVVVGASGVG

SEQ ID NO: 2403 - protein, 15 aa, Synthetic construct
TEYKLVVVGASGVGK

SEQ ID NO: 2404 - protein, 15 aa, Synthetic construct
EYKLVVVGASGVGKS

SEQ ID NO: 2405 - protein, 15 aa, Synthetic construct
YKLVVVGASGVGKSA

SEQ ID NO: 2406 - protein, 15 aa, Synthetic construct
KLVVVGASGVGKSAL

SEQ ID NO: 2407 - protein, 15 aa, Synthetic construct
LVVVGASGVGKSALT

SEQ ID NO: 2408 - protein, 15 aa, Synthetic construct
VVVGASGVGKSALTI

SEQ ID NO: 2409 - protein, 15 aa, Synthetic construct
VVGASGVGKSALTIQ

SEQ ID NO: 2410 - protein, 15 aa, Synthetic construct
VGASGVGKSALTIQL

SEQ ID NO: 2411 - protein, 15 aa, Synthetic construct
GASGVGKSALTIQLI

SEQ ID NO: 2412 - protein, 15 aa, Synthetic construct
ASGVGKSALTIQLIQ

SEQ ID NO: 2413 - protein, 15 aa, Synthetic construct
SGVGKSALTIQLIQN

SEQ ID NO: 2414 - protein, 15 aa, Synthetic construct
GVGKSALTIQLIQNH

SEQ ID NO: 2415 - protein, 15 aa, Synthetic construct
VGKSALTIQLIQNHF

SEQ ID NO: 2416 - protein, 15 aa, Synthetic construct
GKSALTIQLIQNHFV

SEQ ID NO: 2417 - protein, 15 aa, Synthetic construct
MTEYKLVVVGAVGVG

SEQ ID NO: 2418 - protein, 15 aa, Synthetic construct
TEYKLVVVGAVGVGK

SEQ ID NO: 2419 - protein, 15 aa, Synthetic construct
EYKLVVVGAVGVGKS

SEQ ID NO: 2420 - protein, 15 aa, Synthetic construct
YKLVVVGAVGVGKSA

SEQ ID NO: 2421 - protein, 15 aa, Synthetic construct
KLVVVGAVGVGKSAL

SEQ ID NO: 2422 - protein, 15 aa, Synthetic construct
LVVVGAVGVGKSALT

SEQ ID NO: 2423 - protein, 15 aa, Synthetic construct
VVVGAVGVGKSALTI

SEQ ID NO: 2424 - protein, 15 aa, Synthetic construct
VVGAVGVGKSALTIQ

SEQ ID NO: 2425 - protein, 15 aa, Synthetic construct
VGAVGVGKSALTIQL

SEQ ID NO: 2426 - protein, 15 aa, Synthetic construct
GAVGVGKSALTIQLI

SEQ ID NO: 2427 - protein, 15 aa, Synthetic construct
AVGVGKSALTIQLIQ

SEQ ID NO: 2428 - protein, 15 aa, Synthetic construct
VGVGKSALTIQLIQN

SEQ ID NO: 2429 - protein, 15 aa, Synthetic construct
GVGKSALTIQLIQNH

SEQ ID NO: 2430 - protein, 15 aa, Synthetic construct
VGKSALTIQLIQNHF

SEQ ID NO: 2431 - protein, 15 aa, Synthetic construct
GKSALTIQLIQNHFV

SEQ ID NO: 2432 - protein, 15 aa, Synthetic construct
MTEYKLVVVGAGCVG

SEQ ID NO: 2433 - protein, 15 aa, Synthetic construct
TEYKLVVVGAGCVGK

SEQ ID NO: 2434 - protein, 15 aa, Synthetic construct
EYKLVVVGAGCVGKS

SEQ ID NO: 2435 - protein, 15 aa, Synthetic construct
YKLVVVGAGCVGKSA

SEQ ID NO: 2436 - protein, 15 aa, Synthetic construct
KLVVVGAGCVGKSAL

SEQ ID NO: 2437 - protein, 15 aa, Synthetic construct
LVVVGAGCVGKSALT

SEQ ID NO: 2438 - protein, 15 aa, Synthetic construct
VVVGAGCVGKSALTI

SEQ ID NO: 2439 - protein, 15 aa, Synthetic construct
VVGAGCVGKSALTIQ

SEQ ID NO: 2440 - protein, 15 aa, Synthetic construct
VGAGCVGKSALTIQL

SEQ ID NO: 2441 - protein, 15 aa, Synthetic construct
GAGCVGKSALTIQLI

SEQ ID NO: 2442 - protein, 15 aa, Synthetic construct
AGCVGKSALTIQLIQ

SEQ ID NO: 2443 - protein, 15 aa, Synthetic construct
GCVGKSALTIQLIQN

SEQ ID NO: 2444 - protein, 15 aa, Synthetic construct
CVGKSALTIQLIQNH

SEQ ID NO: 2445 - protein, 15 aa, Synthetic construct
VGKSALTIQLIQNHF

SEQ ID NO: 2446 - protein, 15 aa, Synthetic construct
GKSALTIQLIQNHFV

SEQ ID NO: 2447 - protein, 15 aa, Synthetic construct
KSALTIQLIQNHFVD

SEQ ID NO: 2448 - protein, 15 aa, Synthetic construct
MTEYKLVVVGAGDVG

SEQ ID NO: 2449 - protein, 15 aa, Synthetic construct
TEYKLVVVGAGDVGK

SEQ ID NO: 2450 - protein, 15 aa, Synthetic construct
EYKLVVVGAGDVGKS

SEQ ID NO: 2451 - protein, 15 aa, Synthetic construct
YKLVVVGAGDVGKSA

SEQ ID NO: 2452 - protein, 15 aa, Synthetic construct
KLVVVGAGDVGKSAL

SEQ ID NO: 2453 - protein, 15 aa, Synthetic construct
LVVVGAGDVGKSALT

SEQ ID NO: 2454 - protein, 15 aa, Synthetic construct
VVVGAGDVGKSALTI

SEQ ID NO: 2455 - protein, 15 aa, Synthetic construct
VVGAGDVGKSALTIQ

SEQ ID NO: 2456 - protein, 15 aa, Synthetic construct
VGAGDVGKSALTIQL

SEQ ID NO: 2457 - protein, 15 aa, Synthetic construct
GAGDVGKSALTIQLI

SEQ ID NO: 2458 - protein, 15 aa, Synthetic construct
AGDVGKSALTIQLIQ

SEQ ID NO: 2459 - protein, 15 aa, Synthetic construct
GDVGKSALTIQLIQN

SEQ ID NO: 2460 - protein, 15 aa, Synthetic construct
DVGKSALTIQLIQNH

SEQ ID NO: 2461 - protein, 15 aa, Synthetic construct
VGKSALTIQLIQNHF

SEQ ID NO: 2462 - protein, 15 aa, Synthetic construct
GKSALTIQLIQNHFV

SEQ ID NO: 2463 - protein, 15 aa, Synthetic construct
KSALTIQLIQNHFVD

SEQ ID NO: 2464 - protein, 15 aa, Synthetic construct
MTEYKLVVVGAGRVG

SEQ ID NO: 2465 - protein, 15 aa, Synthetic construct
TEYKLVVVGAGRVGK

SEQ ID NO: 2466 - protein, 15 aa, Synthetic construct
EYKLVVVGAGRVGKS

SEQ ID NO: 2467 - protein, 15 aa, Synthetic construct
YKLVVVGAGRVGKSA

SEQ ID NO: 2468 - protein, 15 aa, Synthetic construct
KLVVVGAGRVGKSAL

SEQ ID NO: 2469 - protein, 15 aa, Synthetic construct
LVVVGAGRVGKSALT

SEQ ID NO: 2470 - protein, 15 aa, Synthetic construct
VVVGAGRVGKSALTI

SEQ ID NO: 2471 - protein, 15 aa, Synthetic construct
VVGAGRVGKSALTIQ

SEQ ID NO: 2472 - protein, 15 aa, Synthetic construct
VGAGRVGKSALTIQL

SEQ ID NO: 2473 - protein, 15 aa, Synthetic construct
GAGRVGKSALTIQLI

SEQ ID NO: 2474 - protein, 15 aa, Synthetic construct
AGRVGKSALTIQLIQ

SEQ ID NO: 2475 - protein, 15 aa, Synthetic construct
GRVGKSALTIQLIQN

SEQ ID NO: 2476 - protein, 15 aa, Synthetic construct
RVGKSALTIQLIQNH

SEQ ID NO: 2477 - protein, 15 aa, Synthetic construct
VGKSALTIQLIQNHF

SEQ ID NO: 2478 - protein, 15 aa, Synthetic construct
GKSALTIQLIQNHFV

SEQ ID NO: 2479 - protein, 15 aa, Synthetic construct
KSALTIQLIQNHFVD

SEQ ID NO: 2480 - protein, 15 aa, Synthetic construct
MTEYKLVVVGAGVVG

SEQ ID NO: 2481 - protein, 15 aa, Synthetic construct
TEYKLVVVGAGVVGK

SEQ ID NO: 2482 - protein, 15 aa, Synthetic construct
EYKLVVVGAGVVGKS

SEQ ID NO: 2483 - protein, 15 aa, Synthetic construct
YKLVVVGAGVVGKSA

SEQ ID NO: 2484 - protein, 15 aa, Synthetic construct
KLVVVGAGVVGKSAL

SEQ ID NO: 2485 - protein, 15 aa, Synthetic construct
LVVVGAGVVGKSALT

SEQ ID NO: 2486 - protein, 15 aa, Synthetic construct
VVVGAGVVGKSALTI

SEQ ID NO: 2487 - protein, 15 aa, Synthetic construct
VVGAGVVGKSALTIQ

SEQ ID NO: 2488 - protein, 15 aa, Synthetic construct
VGAGVVGKSALTIQL

SEQ ID NO: 2489 - protein, 15 aa, Synthetic construct
GAGVVGKSALTIQLI

SEQ ID NO: 2490 - protein, 15 aa, Synthetic construct
AGVVGKSALTIQLIQ

SEQ ID NO: 2491 - protein, 15 aa, Synthetic construct
GVVGKSALTIQLIQN

SEQ ID NO: 2492 - protein, 15 aa, Synthetic construct
VVGKSALTIQLIQNH

SEQ ID NO: 2493 - protein, 15 aa, Synthetic construct
VGKSALTIQLIQNHF

SEQ ID NO: 2494 - protein, 15 aa, Synthetic construct
GKSALTIQLIQNHFV

SEQ ID NO: 2495 - protein, 15 aa, Synthetic construct
KSALTIQLIQNHFVD

SEQ ID NO: 2496 - protein, 15 aa, Synthetic construct
DGETCLLDILDTAGE

SEQ ID NO: 2497 - protein, 15 aa, Synthetic construct
GETCLLDILDTAGEE

SEQ ID NO: 2498 - protein, 15 aa, Synthetic construct
ETCLLDILDTAGEEE

SEQ ID NO: 2499 - protein, 15 aa, Synthetic construct
TCLLDILDTAGEEEY

SEQ ID NO: 2500 - protein, 15 aa, Synthetic construct
CLLDILDTAGEEEYS

SEQ ID NO: 2501 - protein, 15 aa, Synthetic construct
LLDILDTAGEEEYSA

SEQ ID NO: 2502 - protein, 15 aa, Synthetic construct
LDILDTAGEEEYSAM

SEQ ID NO: 2503 - protein, 15 aa, Synthetic construct
DILDTAGEEEYSAMR

SEQ ID NO: 2504 - protein, 15 aa, Synthetic construct
ILDTAGEEEYSAMRD

SEQ ID NO: 2505 - protein, 15 aa, Synthetic construct
LDTAGEEEYSAMRDQ

SEQ ID NO: 2506 - protein, 15 aa, Synthetic construct
DTAGEEEYSAMRDQY

SEQ ID NO: 2507 - protein, 15 aa, Synthetic construct
TAGEEEYSAMRDQYM

SEQ ID NO: 2508 - protein, 15 aa, Synthetic construct
AGEEEYSAMRDQYMR

SEQ ID NO: 2509 - protein, 15 aa, Synthetic construct
GEEEYSAMRDQYMRT

SEQ ID NO: 2510 - protein, 15 aa, Synthetic construct
EEEYSAMRDQYMRTG

SEQ ID NO: 2511 - protein, 15 aa, Synthetic construct
EEYSAMRDQYMRTGE

SEQ ID NO: 2512 - protein, 15 aa, Synthetic construct
EYSAMRDQYMRTGEG

SEQ ID NO: 2513 - protein, 15 aa, Synthetic construct
YSAMRDQYMRTGEGF

SEQ ID NO: 2514 - protein, 15 aa, Synthetic construct
DGETCLLDILDTAGH

SEQ ID NO: 2515 - protein, 15 aa, Synthetic construct
GETCLLDILDTAGHE

SEQ ID NO: 2516 - protein, 15 aa, Synthetic construct
ETCLLDILDTAGHEE

SEQ ID NO: 2517 - protein, 15 aa, Synthetic construct
TCLLDILDTAGHEEY

SEQ ID NO: 2518 - protein, 15 aa, Synthetic construct
CLLDILDTAGHEEYS

SEQ ID NO: 2519 - protein, 15 aa, Synthetic construct
LLDILDTAGHEEYSA

SEQ ID NO: 2520 - protein, 15 aa, Synthetic construct
LDILDTAGHEEYSAM

SEQ ID NO: 2521 - protein, 15 aa, Synthetic construct
DILDTAGHEEYSAMR

SEQ ID NO: 2522 - protein, 15 aa, Synthetic construct
ILDTAGHEEYSAMRD

SEQ ID NO: 2523 - protein, 15 aa, Synthetic construct
LDTAGHEEYSAMRDQ

SEQ ID NO: 2524 - protein, 15 aa, Synthetic construct
DTAGHEEYSAMRDQY

SEQ ID NO: 2525 - protein, 15 aa, Synthetic construct
TAGHEEYSAMRDQYM

SEQ ID NO: 2526 - protein, 15 aa, Synthetic construct
AGHEEYSAMRDQYMR

SEQ ID NO: 2527 - protein, 15 aa, Synthetic construct
GHEEYSAMRDQYMRT

SEQ ID NO: 2528 - protein, 15 aa, Synthetic construct
HEEYSAMRDQYMRTG

SEQ ID NO: 2529 - protein, 15 aa, Synthetic construct
EEYSAMRDQYMRTGE

SEQ ID NO: 2530 - protein, 15 aa, Synthetic construct
EYSAMRDQYMRTGEG

SEQ ID NO: 2531 - protein, 15 aa, Synthetic construct
YSAMRDQYMRTGEGF

SEQ ID NO: 2532 - protein, 15 aa, Synthetic construct
DGETCLLDILDTAGK

SEQ ID NO: 2533 - protein, 15 aa, Synthetic construct
GETCLLDILDTAGKE

SEQ ID NO: 2534 - protein, 15 aa, Synthetic construct
ETCLLDILDTAGKEE

SEQ ID NO: 2535 - protein, 15 aa, Synthetic construct
TCLLDILDTAGKEEY

SEQ ID NO: 2536 - protein, 15 aa, Synthetic construct
CLLDILDTAGKEEYS

SEQ ID NO: 2537 - protein, 15 aa, Synthetic construct
LLDILDTAGKEEYSA

SEQ ID NO: 2538 - protein, 15 aa, Synthetic construct
LDILDTAGKEEYSAM

SEQ ID NO: 2539 - protein, 15 aa, Synthetic construct
DILDTAGKEEYSAMR

SEQ ID NO: 2540 - protein, 15 aa, Synthetic construct
ILDTAGKEEYSAMRD

SEQ ID NO: 2541 - protein, 15 aa, Synthetic construct
LDTAGKEEYSAMRDQ

SEQ ID NO: 2542 - protein, 15 aa, Synthetic construct
DTAGKEEYSAMRDQY

SEQ ID NO: 2543 - protein, 15 aa, Synthetic construct
TAGKEEYSAMRDQYM

SEQ ID NO: 2544 - protein, 15 aa, Synthetic construct
AGKEEYSAMRDQYMR

SEQ ID NO: 2545 - protein, 15 aa, Synthetic construct
GKEEYSAMRDQYMRT

SEQ ID NO: 2546 - protein, 15 aa, Synthetic construct
KEEYSAMRDQYMRTG

SEQ ID NO: 2547 - protein, 15 aa, Synthetic construct
EEYSAMRDQYMRTGE

SEQ ID NO: 2548 - protein, 15 aa, Synthetic construct
EYSAMRDQYMRTGEG

SEQ ID NO: 2549 - protein, 15 aa, Synthetic construct
YSAMRDQYMRTGEGF

SEQ ID NO: 2550 - protein, 15 aa, Synthetic construct
DGETCLLDILDTAGL

SEQ ID NO: 2551 - protein, 15 aa, Synthetic construct
GETCLLDILDTAGLE

SEQ ID NO: 2552 - protein, 15 aa, Synthetic construct
ETCLLDILDTAGLEE

SEQ ID NO: 2553 - protein, 15 aa, Synthetic construct
TCLLDILDTAGLEEY

SEQ ID NO: 2554 - protein, 15 aa, Synthetic construct
CLLDILDTAGLEEYS

SEQ ID NO: 2555 - protein, 15 aa, Synthetic construct
LLDILDTAGLEEYSA

SEQ ID NO: 2556 - protein, 15 aa, Synthetic construct
LDILDTAGLEEYSAM

SEQ ID NO: 2557 - protein, 15 aa, Synthetic construct
DILDTAGLEEYSAMR

SEQ ID NO: 2558 - protein, 15 aa, Synthetic construct
ILDTAGLEEYSAMRD

SEQ ID NO: 2559 - protein, 15 aa, Synthetic construct
LDTAGLEEYSAMRDQ

SEQ ID NO: 2560 - protein, 15 aa, Synthetic construct
DTAGLEEYSAMRDQY

SEQ ID NO: 2561 - protein, 15 aa, Synthetic construct
TAGLEEYSAMRDQYM

SEQ ID NO: 2562 - protein, 15 aa, Synthetic construct
AGLEEYSAMRDQYMR

SEQ ID NO: 2563 - protein, 15 aa, Synthetic construct
GLEEYSAMRDQYMRT

SEQ ID NO: 2564 - protein, 15 aa, Synthetic construct
LEEYSAMRDQYMRTG

SEQ ID NO: 2565 - protein, 15 aa, Synthetic construct
EEYSAMRDQYMRTGE

SEQ ID NO: 2566 - protein, 15 aa, Synthetic construct
EYSAMRDQYMRTGEG

SEQ ID NO: 2567 - protein, 15 aa, Synthetic construct
YSAMRDQYMRTGEGF

SEQ ID NO: 2568 - protein, 15 aa, Synthetic construct
DGETCLLDILDTAGP

SEQ ID NO: 2569 - protein, 15 aa, Synthetic construct
GETCLLDILDTAGPE

SEQ ID NO: 2570 - protein, 15 aa, Synthetic construct
ETCLLDILDTAGPEE

SEQ ID NO: 2571 - protein, 15 aa, Synthetic construct
TCLLDILDTAGPEEY

SEQ ID NO: 2572 - protein, 15 aa, Synthetic construct
CLLDILDTAGPEEYS

SEQ ID NO: 2573 - protein, 15 aa, Synthetic construct
LLDILDTAGPEEYSA

SEQ ID NO: 2574 - protein, 15 aa, Synthetic construct
LDILDTAGPEEYSAM

SEQ ID NO: 2575 - protein, 15 aa, Synthetic construct
DILDTAGPEEYSAMR

SEQ ID NO: 2576 - protein, 15 aa, Synthetic construct
ILDTAGPEEYSAMRD

SEQ ID NO: 2577 - protein, 15 aa, Synthetic construct
LDTAGPEEYSAMRDQ

SEQ ID NO: 2578 - protein, 15 aa, Synthetic construct
DTAGPEEYSAMRDQY

SEQ ID NO: 2579 - protein, 15 aa, Synthetic construct
TAGPEEYSAMRDQYM

SEQ ID NO: 2580 - protein, 15 aa, Synthetic construct
AGPEEYSAMRDQYMR

SEQ ID NO: 2581 - protein, 15 aa, Synthetic construct
GPEEYSAMRDQYMRT

SEQ ID NO: 2582 - protein, 15 aa, Synthetic construct
PEEYSAMRDQYMRTG

SEQ ID NO: 2583 - protein, 15 aa, Synthetic construct
EEYSAMRDQYMRTGE

SEQ ID NO: 2584 - protein, 15 aa, Synthetic construct
EYSAMRDQYMRTGEG

SEQ ID NO: 2585 - protein, 15 aa, Synthetic construct
YSAMRDQYMRTGEGF

SEQ ID NO: 2586 - protein, 15 aa, Synthetic construct
DGETCLLDILDTAGR

SEQ ID NO: 2587 - protein, 15 aa, Synthetic construct
GETCLLDILDTAGRE

SEQ ID NO: 2588 - protein, 15 aa, Synthetic construct
ETCLLDILDTAGREE

SEQ ID NO: 2589 - protein, 15 aa, Synthetic construct
TCLLDILDTAGREEY

SEQ ID NO: 2590 - protein, 15 aa, Synthetic construct
CLLDILDTAGREEYS

SEQ ID NO: 2591 - protein, 15 aa, Synthetic construct
LLDILDTAGREEYSA

SEQ ID NO: 2592 - protein, 15 aa, Synthetic construct
LDILDTAGREEYSAM

SEQ ID NO: 2593 - protein, 15 aa, Synthetic construct
DILDTAGREEYSAMR

SEQ ID NO: 2594 - protein, 15 aa, Synthetic construct
ILDTAGREEYSAMRD

SEQ ID NO: 2595 - protein, 15 aa, Synthetic construct
LDTAGREEYSAMRDQ

SEQ ID NO: 2596 - protein, 15 aa, Synthetic construct
DTAGREEYSAMRDQY

SEQ ID NO: 2597 - protein, 15 aa, Synthetic construct
TAGREEYSAMRDQYM

SEQ ID NO: 2598 - protein, 15 aa, Synthetic construct
AGREEYSAMRDQYMR

SEQ ID NO: 2599 - protein, 15 aa, Synthetic construct
GREEYSAMRDQYMRT

SEQ ID NO: 2600 - protein, 15 aa, Synthetic construct
REEYSAMRDQYMRTG

SEQ ID NO: 2601 - protein, 15 aa, Synthetic construct
EEYSAMRDQYMRTGE

SEQ ID NO: 2602 - protein, 15 aa, Synthetic construct
EYSAMRDQYMRTGEG

SEQ ID NO: 2603 - protein, 15 aa, Synthetic construct
YSAMRDQYMRTGEGF

SEQ ID NO: 2604 - protein, 98 aa, Homo sapiens
MIPGGLSEAKPATPEIQEIVDKVKPQLEEKTNETYGKLEAVQYKTQVVAGTNYYIKVRAGDNKYMHLKVFKSLPGQNEDLVLTGYQVDKNKDDELTGF

SEQ ID NO: 2605 - protein, 98 aa, Homo sapiens
MMCGAPSATQPATAETQHIADQVRSQLEEKENKKFPVFKAVSFKSQVVAGTNYFIKVHVGDEDFVHLRVFQSLPHENKPLTLSNYQTNKAKHDELTYF

SEQ ID NO: 2606 - protein, 146 aa, Homo sapiens
MAGPLRAPLLLLAILAVALAVSPAAGSSPGKPPRLVGGPMDASVEEEGVRRALDFAVGEYNKASNDMYHSRALQVVRARKQIVAGVNYFLDVELGRTTCTKTQPNLDNCPFHDQPHLKRKAFCSFQIYAVPWQGTMTLSKSTCQDA

SEQ ID NO: 2607 - protein, 339 aa, Homo sapiens
MWQLWASLCCLLVLANARSRPSFHPLSDELVNYVNKRNTTWQAGHNFYNVDMSYLKRLCGTFLGGPKPPQRVMFTEDLKLPASFDAREQWPQCPTIKEIRDQGSCGSCWAFGAVEAISDRICIHTNAHVSVEVSAEDLLTCCGSMCGDGCNGGYPAEAWNFWTRKGLVSGGLYESHVGCRPYSIPPCEHHVNGSRPPCTGEGDTPKCSKICEPGYSPTYKQDKHYGYNSYSVSNSEKDIMAEIYKNGPVEGAFSVYSDFLLYKSGVYQHVTGEMMGGHAIRILGWGVENGTPYWLVANSWNTDWGDNGFFKILRGQDHCGIESEVVAGIPRTDQYWEKI

SEQ ID NO: 2608 - protein, 333 aa, Homo sapiens [sequence omitted]

SEQ ID NO: 2609 - protein, 331 aa, Homo sapiens
MKRLVCVLLVCSSAVAQLHKDPTLDHHWHLWKKTYGKQYKEKNEEAVRRLIWEKNLKFVMLHNLEHSMGMHSYDLGMNHLGDMTSEEVMSLMSSLRVPSQWQRNITYKSNPNRILPDSVDWREKGCVTEVKYQGSCGACWAFSAVGALEAQLKLKTGKLVSLSAQNLVDCSTEKYGNKGCNGGFMTTAFQYIIDNKGIDSDASYPYKAMDQKCQYDSKYRAATCSKYTELPYGREDVLKEAVANKGPVSVGVDARHPSFFLYRSGVYYEPSCTQNVNHGVLVVGYGDLNGKEYWLVKNSWGHNFGEEGYIRMARNKGNHCGIASFPSYPEI

SEQ ID NO: 2610 - protein, 15 aa, Synthetic construct
NARSRPSFHPLSDEL

SEQ ID NO: 2611 - protein, 13 aa, Synthetic construct
KRNTTWQAGHNFY

SEQ ID NO: 2612 - protein, 15 aa, Synthetic construct
LGGPKPPQRVMFTED

SEQ ID NO: 2613 - protein, 13 aa, Synthetic construct
IRDQGSCGSCWAF

SEQ ID NO: 2614 - protein, 15 aa, Synthetic construct
DGCNGGYPAEAWNFW

SEQ ID NO: 2615 - protein, 24 aa, Synthetic construct
VNGSRPPCTGEGDTPKCSKICEPG

SEQ ID NO: 2616 - protein, 17 aa, Synthetic construct
EPGYSPTYKQDKHYGYN

SEQ ID NO: 2617 - protein, 15 aa, Synthetic construct
YSVSNSEKDIMAEIY

SEQ ID NO: 2618 - protein, 14 aa, Synthetic construct
NQEYREGKHSFTMA

SEQ ID NO: 2619 - protein, 17 aa, Synthetic construct
FQNRKPRKGKVFQEPLF

SEQ ID NO: 2620 - protein, 12 aa, Synthetic construct
KNQGQCGSCWAF

SEQ ID NO: 2621 - protein, 19 aa, Synthetic construct
DCSGPQGNEGCNGGLMDYA

SEQ ID NO: 2622 - protein, 24 aa, Synthetic construct
QDNGGLDSEESYPYEATEESCKYN

SEQ ID NO: 2623 - protein, 13 aa, Synthetic construct
CSSEDMDHGVLVV

SEQ ID NO: 2624 - protein, 17 aa, Synthetic construct
GFESTESDNNKYWLVKN

SEQ ID NO: 2625 - protein, 20 aa, Synthetic construct
TYGKQYKEKNEEAVRRLIWE

SEQ ID NO: 2626 - protein, 15 aa, Synthetic construct
YKSNPNRILPDSVDW

SEQ ID NO: 2627 - protein, 19 aa, Synthetic construct
CSTEKYGNKGCNGGFMTTA

SEQ ID NO: 2628 - protein, 18 aa, Synthetic construct
NKGIDSDASYPYKAMDQK

SEQ ID NO: 2629 - protein, 15 aa, Synthetic construct
VANKGPVSVGVDARH